United States Patent Application Publication US 2007/0015145 A1 - sequence listing, part 5

SEQ ID NO: 12108 - DNA, 2294 bp, Homo sapiens
  ref <308>: DATABASE ACCESSION NUMBER: EMBL / D00244
  ref <309>: DATABASE ENTRY DATE: 1998-02-20
cagcgccggctcgcgccctcctgccgcagccaccgagccgccgtctagcgccccgacctcgccaccatgagagccctgctggcgcgcctgcttctctgcgtcctggtcgtgagcgactccaaaggcagcaatgaacttcatcaagttccatcgaactgtgactgtctaaatggaggaacatgtgtgtccaacaagtacttctccaacattcactggtgcaactgcccaaagaaattcggagggcagcactgtgaaatagataagtcaaaaacctgctatgaggggaatggtcacttttaccgaggaaaggccagcactgacaccatgggccggccctgcctgccctggaactctgccactgtccttcagcaaacgtaccatgcccacagatctgatgctcttcagctgggcctggggaaacataattactgcaggaacccagacaaccggaggcgaccctggtgctatgtgcaggtgggcctaaagccgcttgtccaagagtgcatggtgcatgactgcgcagatggaaaaaagccctcctctcctccagaagaattaaaatttcagtgtggccaaaagactctgaggccccgctttaagattattgggggagaattcaccaccatcgagaaccagccctggtttgcggccatctacaggaggcaccgggggggctctgtcacctacgtgtgtggaggcagcctcatcagcccttgctgggtgatcagcgccacacactgcttcattgattacccaaagaaggaggactacatcgtctacctgggtcgctcaaggcttaactccaacacgcaaggggagatgaagtttgaggtggaaaacctaatcctacacaaggactacagcgctgacacgcttgctcaccacaacgacattgccttgctgaagatccgttccaaggagggcaggtgtgcgcagccatcccggactatacagaccatctgcctgccctcgatgtataacgatccccagtttggcacaagctgtgagatcactggctttggaaaagagaattctaccgactatctctatccggagcagctgaaaatgactgttgtgaagctgatttcccaccgggagtgtcagcagccccactactacggctctgaagtcaccaccaaaatgctgtgtgctgctgacccacagtggaaaacagattcctgccagggagactcagggggacccctcgtctgttccctccaaggccgcatgactttgactggaattgtgagctggggccgtggatgtgccctgaaggacaagccaggcgtctacacgagagtctcacacttcttaccctggatccgcagtcacaccaaggaagagaatggcctggccctctgagggtccccagggaggaaacgggcaccacccgctttcttgctggttgctattttgcagtagagtcatctccatcagctgtaagaagagctgggaatataggctctgcacagatggatttgcctgtgccaccaccagggcgaacgacaatagctttaccctcaggcataggcctgggtgctggctgcccagacccctctggccaggatggaggggtggtcctgactcaacatgttactgaccagcaacttgtctttttctggactgaagcctgcaggagttaaaaagggcagggcatctcctgtgcatgggctcgaagggagagccagctcccccgaccggtgggcatttgtgaggcccatggttgagaaatgaataatttcccaattaggaagtgtaagcagctgaggtctcttgagggagcttagccaatgtgggagcagcggtttggggagcagagacactaacgacttcagggcagggctctgatattccatgaatgtatcaggaaatatatatgtgtgtgtatgtttgcacacttgtgtgtgggctgtgagtgtaagtgtgagtaagagctggtgtctgattgttaagtctaaatatttccttaaactgtgtggactgtgatgccacacagagtggtctttctggagaggttataggtcactcctggggcctcttgggtcccccacgtgacagtgcctgggaatgtattattctgcagcatgacctgtgaccagcactgtctcagtttcactttcacatagatgtccctttcttggccagttatcccttccttttagcctagttcatccaatcctcactgggtggggtgaggaccactcctgtacactgaatatttatatttcactatttttatttatatttttgtaattttaaataaaagtgatcaataaaatgtgatttttctgatg

SEQ ID NO: 12109 - protein, 431 aa, Homo sapiens [sequence omitted]

SEQ ID NO: 12110 - DNA, 1943 bp, Rattus norvegicus
  ref <308>: DATABASE ACCESSION NUMBER: EMBL / X64563
  ref <309>: DATABASE ENTRY DATE: 1997-05-09
gagctttctttctagattgaaacaatggaagaactgtccatggcaaacaccatgtttgccctcaatctccttaagcagatagaacaatcgaactctacccagaacatctttatttctccatggagcatctcatccacattggccatagttttccttggtgctcaggctaacactgaagagcaaatggccaaagtgctgaattttgacaaaattggcagctacgacctcactccaggaaacccagagaacttccatggctgtgattttgcacaacacatacagagggacaattatcctgttgctattttacaggcacaagcaagagacaaaatccattcagccttctcctctctcagctcgacaatcaacacaccacgcttgggagattatttactagaaagtgcaaacaagctgtttggagagaaatctgcaagattcaaagaagaatacatacaacgctgtaagaaatattattctacagaaccagaagcagtagacttccttgaatgtgccaatgaagctagaaaaaagattaattcttgggttaaaactcaaaccaaaggtgaaatcccaaacctgctacctgaaggttctgtagacgaagacaccaaaatggtcctggtgaatactatctacttcaaaggacggtggaaaactccatttcagaagagacttaatgggctttatcctttccgtgtgaacttgaatgaaagcaaacctgtccagatgatgtacctccgtgaaaagctgaacattggatacataaaggacctgaagactcagatcctagaacttccgtatattggaaacatcagtatgttcctgttgcttcctgatgagatcgaagattcatccaccggcttggagatgctggaaagggaaataaacttcgataacttcaacaagtggatcagcaaagagacactggatgaagatgatgttttggtctacattcccaagttcaaactggcacaaaactacgaactcaagcccattctgcaacgcatgggcatggaagatgccttcaacaagggcaaggccgacttctcgggaatgtctgagagcaatgacctttttctttctgaagtgttccatcaagccacagtagatgtgaacgaggagggcactgtggcagctggtgggactggggcagttatgacagggagaactggtcatggtggtccacagtttgtggctgatcatccctttcttttctttatcatgaacaacattacccgcaccatactatttgttggtagattctcctcaccctaaaaggggaagaccttgttttcacattagattttgaagcatgcgctgtaagcctcagaattgcttcttcaagtgccaaaagtcaaaatattttcctacacatttttatactgctatacactaaatacaaactgtacaacagtctgcactgcttacagtataactccgttaatgatttttttccaaacgatgtgtgtttagttcatccttattactgctttgtcattatagctttagtttttacagtgttatttattatttacataatggttgttttacagattgttgtcctctgtctatttaataagactataatactacagaagcagataatcagataattttctatttaaagaaaaacagccattcaatgtaattatgaaggaaaatatgatttttctatgatttctcatgataatcacccagaaaaatgtatttaacaaaagacaacaacatgttatatgtctatcattgtatatcttatgtacatatctgcaagtcatctataattagaaatacatcatacttccttactcaatgctatttgttgttctctgttaggtatgcacaacagaatacttagcaatccttgtttgttagtcatctttcaatcactgtaacaaaataccagagataataaagttcaaagatttaaaaaaaaaaaaaaaaaa

SEQ ID NO: 12111 - protein, 416 aa, Rattus norvegicus; identical to SEQ ID NO: 5206
  ref <308>: DATABASE ACCESSION NUMBER: SWISS-Prot / P29524
  ref <309>: DATABASE ENTRY DATE: 2001-10-16

SEQ ID NO: 12112 - DNA, 1880 bp, Homo sapiens
  ref <308>: DATABASE ACCESSION NUMBER: EMBL / M18082
  ref <309>: DATABASE ENTRY DATE: 1999-07-02
gaattccccagagaacaaccagattgaaacaatggaggatctttgtgtggcaaacacactctttgccctcaatttattcaagcatctggcaaaagcaagccccacccagaacctcttcctctccccatggagcatctcgtccaccatggccatggtctacatgggctccaggggcagcaccgaagaccagatggccaaggtgcttcagtttaatgaagtgggagccaatgcagttacccccatgactccagagaactttaccagctgtgggttcatgcagcagatccagaagggtagttatcctgatgcgattttgcaggcacaagctgcagataaaatccattcatccttccgctctctcagctctgcaatcaatgcatccacaggggattatttactggaaagtgtcaataagctgtttggtgagaagtctgcgagcttccgggaagaatatattcgactctgtcagaaatattactcctcagaaccccaggcagtagacttcctagaatgtgcagaagaagctagaaaaaagattaattcctgggtcaagactcaaaccaaaggcaaaatcccaaacttgttacctgaaggttctgtagatggggataccaggatggtcctggtgaatgctgtctacttcaaaggaaagtggaaaactccatttgagaagaaactaaatgggctttatcctttccgtgtaaactcggctcagcgcacacctgtacagatgatgtacttgcgtgaaaagctaaacattggatacatagaagacctaaaggctcagattctagaactcccatatgctggagatgttagcatgttcttgttgcttccagatgaaattgccgatgtgtccactggcttggagctgctggaaagtgaaataacctatgacaaactcaacaagtggaccagcaaagacaaaatggctgaagatgaagttgaggtatacataccccagttcaaattagaagagcattatgaactcagatccattctgagaagcatgggcatggaggacgccttcaacaagggacgggccaatttctcagggatgtcggagaggaatgacctgtttctttctgaagtgttccaccaagccatggtggatgtgaatgaggagggcactgaagcagccgctggcacaggaggtgttatgacagggagaactggacatggaggcccacagtttgtggcagatcatccgtttctttttcttattatgcataagataaccaagtgcattttatttttcggcagattttgctcaccctaaaactaagcgtgctgcttctgcaaaagatttttgtagatgagctgtgtgcctcagaattgctatttcaaattgccaaaaatttagagatgttttctacatatttctgctcttctgaacaacttctgctacccactaaataaaaacacagaaataattagacaattgtctattataacatgacaaccctattaatcatttggtcttctaaaatgggatcatgcccatttagattttccttactatcagtttatttttataacattaacttttactttgttatttattattttatataatggtgagttttaaattattgctcactgcctatttaatgtagctaataaagttatagaagcagatgatctgttaatttcctatctaataaatgcctttaattgttctcataatgaagaataagtaggtatccctccatgcccttctataataaatatctggaaaaaacattaaacaataggcaaatatatgttatgtgcatttctagaaatacataacacatatatatgtctgtatcttatattcaattgcaagtatataataaataaacctgcttccaaacaacaaaaaaaaaaaaaaggaattc

SEQ ID NO: 12113 - protein, 415 aa, Homo sapiens
  ref <308>: DATABASE ACCESSION NUMBER: SWISS-Prot / P05120
  ref <309>: DATABASE ENTRY DATE: 2002-06-15
MEDLCVANTLFALNLFKHLAKASPTQNLFLSPWSISSTMAMVYMGSRGSTEDQMAKVLQFNEVGANAVTPMTPENFTSCGFMQQIQKGSYPDAILQAQAADKIHSSFRSLSSAINASTGNYLLESVNKLFGEKSASFREEYIRLCQKYYSSEPQAVDFLECAEEARKKINSWVKTQTKGKIPNLLPEGSVDGDTRMVLVNAVYFKGKWKTPFEKKLNGLYPFRVNSAQRTPVQMMYLREKLNIGYIEDLKAQILELPYAGDVSMFLLLPDEIADVSTGLELLESEITYDKLNKWTSKDKMAEDEVEVYIPQFKLEEHYELRSILRSMGMEDAFNKGRANFSGMSERNDLFLSEVFHQAMVDVNEEGTEAAAGTGGVMTGRTGHGGPQFVADHPFLFLIMHKITNCILFFGRFSSP

SEQ ID NO: 12114 - DNA, 3774 bp, Rattus norvegicus
  ref <308>: DATABASE ACCESSION NUMBER: EMBL / X65036
  ref <309>: DATABASE ENTRY DATE: 1992-05-13
ttcaacctggatgtgatgggtgccatacgcaaggagggagaacctggcagcttattcggcttttcggtggccctacaccgacaattacagccccgaccccagagctggctgctggtgggtgccccccaggccctggactcttacccggacagcaggcaaatcgcacatgggaggcctctttgcttgtccctgagcctagaggagacagactgctacagagtggacatcgacaggggagctaatgtgcagaaggaaagcaaggagaaccagtggctgggagtcagcgtgcgaccgagggagtccgggggcaaggttgttacctgtgcacaccgatatgagtctcgacaggaagtggaccaggttttggagactcgagatgtgattggtcgttgctttgtgctgagccaggacctggccatccgtgatgagttggatggtggggagtggaagttctgtgaagggcgcccccagggccacgaacaatttgggttctgccagcagggcacagctgccaccttctcccccgacagccactacctcatttttggggctccaggaacctataactggaagggcacagccagggtggagctctgtgcgcagggctcgtcggacctggcacaggtggatgatgggccctacgaggcggggggcgagaaggaccaagacccccgtccttcaccggtccctgccaacagctaccttggtttctccattgattctgggaagggtctcatgcgctcagaagagctgagttttgtggcaggggccccacgtgccaaccacaaaggggctgtggtcattctgcgcaaggatagtgccagccgcctgattcctgaggttgtgctgtctggggagcgcctgacctctggctttggctactccctggctgtgactgacctcaacagtgatggctgggcagacctgattgtgggtgctccctacttctttgaacgccaagaagaacttggaggagccgtgtatgtgtacatgaaccagggtggccattgggcagatatctctcctctccgactctgtggctcccctcactccatgtttgggatcagtttggctgtactgggggacctcaatcaagatggcttcccagacattgctgtaggagctccctttgatggagatgggaaagtctttatctatcatgggagcagcctgggggtggtcaccaaaccttcacaggtgctggagggtgaggctgtgggtatcaagagctttggttactccctgtctggtggcctggatgtggacggaaatcactacccggacctgcttgtgggctccctggctgatactgctgctctgttcagggccagacctgttctacatgtctcccaagaaatcttcattgatccaagagccatcgatctggaacagcccaactgtgccgacggacgcttggtctgcgtgcacgtaaaggtctgtttcagttatgttgctgtgcccagcagctacagccctattgtggtcctagattatgtgttagatggggacacagaccggaggctccggggccaggctccacgtgtgactttcccgggccgaggcccggatgatctcaagcatcagtcctcgggcaccgtgtcgttgaagcaccaacatgacagagtctgtggagacacatgtgttccagctgcaggaaaacgtaaagacaagctacgggccattgtggtgaccctgtcatatggtctccaaacccctcgattaaggaggcaagcgcctgaccaggggctcccccttgtggctgggatcctcaacgctcaccagcccagtacacagaggactgagatccacttcctgaagcaaggctgtggtgacgataagatctgtcagagcaacctccagcttgtgcaggcccagttctgttcccggatcagcgacacagagttccaggctctgcccatggatctggatgggaccgccctgtttgcgcatggcgggcagccattcataggcctggagctgacagtcaccaacctgccctctgacccagcccggcctcaggcagatggggatgatgctcatgaagcccagctcctggccaccctcccagcctctcttcgatactcgggagtccgcactctggactctgtggagaagccgctctgcctgtccaacgagaatgcctctcatgtcgagtgtgagctcgggaaccctatgaagagaggcactcaggtcaccttttacctcatcctcagcacctctggaatcaccattgagaccacagagctgaaggtggaattgctcttagccacgatcagtgagcaggacctgcatccggtctccgttcgggctcatgtcttcattgaattgccgctgtccatttcaggggtggccactcctcagcaactcttcttctctggcaaggtgaagggggagagcgccatgcggtctgagtgggacgagggcagcaaggtcaagtacgaggtcacggtctccaatcaaggccagtcactcaatactctgggctctgccttcctcaacatcatgtggccccatgagatcgccaatgggaaatggctgttgtaccccatgcgggtggagctggagggtggacaggggcctgagaagaaagggatctgctccccaagacccaacatcctccacctggatgtggacagcagggataggaggcggcgagagctggggcagccggagcctcaggagcctccagagaaggtggaacctagcacatcttggtggccagtgtcctccgctgagaagagaaacgtgactctggactgcccaggcacggccaagtgtgtggtattcagctgcccactctacagctttgaccgtgcagccgtgcttcatgtctggggccgcctctggaacagcacctttctggaggagtacatgtccgtgaagtccctggaggtgatcgtccgagccaacatcacagtgaaatcctccattaagaacttgctgctcagagatgcatccacagtgatcccagtgatggtatacttggacccggtggctgtggttgcagaaggagtcccctggtgggtcatcctcctggcggtgctggctgggctgctagtactggccctgctggtgctgctgctgtggaagctgggattcttcaagcgggcgaagcaccctgaggccactgtaccccagtaccacgcagtgaagatccttcgggaagaccggcagcagttcaaggaggagaagacaggcaccattcagaggagtaactggggcaattcccagtgggagggctccgacgcacaccctatcctggctgccgactggcaccctgagttgggtcctgatggacatcctgtgtcagtcactgcctaacttctcctgtcccaagccagcctctgggttccttccaccctttcccaagatggctctttgggggtggagatagtggagtaggttgctggcttcatgttgaaataaggcaggttctgctttctcaggggcacagatctttcccaccgtgagaaccaccccttcccatcttctccgtacaatgctgtgagacacggggcatggctggaaggacaggcatgacctggtgcaggatggagaagaaggggtactgagctgcctctctcacccaccctgtaagaccgtcttccccaaagtgccttagacagagggtcagggaagagatcgtgtcactgtctcaggggcccttccctcctaagtctttcctgtgctctggccttagtgtgctgtaccagcccagcggatcttgtctatttattaaaaagtatttgacaataaaaaaaaaaaaaaaaaaaa

SEQ ID NO: 12115 - protein, 1106 aa, Rattus norvegicus
  ref <308>: DATABASE ACCESSION NUMBER: SWISS-Prot / Q63258
  ref <309>: DATABASE ENTRY DATE: 2002-06-15
FNLDVMGAIRKEGEPGSLFGFSVALHRQLQPRPQSWLLVGAPQALDSYPDSRQIAHGRPLCLSLSLEETDCYRVDIDRGANVQKESKENQWLGVSVRPRESGGKVVTCAHRYESRQEVDQVLETRDVIGRCFVLSQDLAIRDELDGGEWKFCEGRPQGHEQFGFCQQGTAATFSPDSHYLIFGAPGTYNWKGTARVELCAQGSSDLAQVDDGPYEAGGEKDQDPRPSPVPANSYLGFSIDSGKGLMRSEELSFVAGAPRANHKGAVVILRKDSASRLIPEVVLSGERLTSGFGYSLAVTDLNSDGWADLIVGAPYFFERQEELGGAVYVYMNQGGHWADISPLRLCGSPHSMFGISLAVLGDLNQDGFPDIAVGAPFDGDGKVFIYHGSSLGVVTKPSQVLEGEAVGIKSFGYSLSGGLDVDGNHYPDLLVGSLADTAALFRARPVLHVSQEIFIDPRAIDLEQPNCADGRLVCVHVKVCFSYVAVPSSYSPIVVLDYVLDGDTDRRLRGQAPRVTFPGRGPDDLKHQSSGTVSLKHQHDRVCGDTCVPAAGKRKDKLRAIVVTLSYGLQTPRLRRQAPDQGLPLVAGILNAHQPSTQRTEIHFLKQGCGDDKICQSNLQLVQAQFCSRISDTEFQALPMDLDGTALFAHGGQPFIGLELTVTNLPSDPARPQADGDDAHEAQLLATLPASLRYSGVRTLDSVEKPLCLSNENASHVECELGNPMKRGTQVTFYLILSTSGITIETTELKVELLLATISEQDLHPVSVRAHVFIELPLSISGVATPQQLFFSGKVKGESAMRSEWDEGSKVKYEVTVSNQGQSLNTLGSAFLNIMWPHEIANGKWLLYPMRVELEGGQGPEKKGICSPRPNILHLDVDSRDRRRRELGQPEPQEPPEKVEPSTSWWPVSSAEKRNVTLDCPGTAKCVVFSCPLYSFDRAAVLHVWGRLWNSTFLEEYMSVKSLEVIVRANITVKSSIKNLLLRDASTVIPVMVYLDPVAVVAEGVPWWVILLAVLAGLLVLALLVLLLWKLGFFKRAKHPEATVPQYHAVKILREDRQQFKEEKTGTIQRSNWGNSQWEGSDAHPILAADWHPELGPDGHPVSVTA

SEQ ID NO: 12116 - DNA, 4079 bp, Homo sapiens
  ref <308>: DATABASE ACCESSION NUMBER: EMBL / AF032108
  ref <309>: DATABASE ENTRY DATE: 1999-06-30
ggagcggcgggcgggcgggagggctggcggggcgaacgtctgggagacgtctgaaagaccaacgagactttggagaccagagacgcgcctggggggacctggggcttggggcgtgcgagatttcccttgcattcgctgggagctcgcgcagggatcgtcccatggccggggctcggagccgcgacccttggggggcctccgggatttgctacctttttggctccctgctcgtcgaactgctcttctcacgggctgtcgccttcaatctggacgtgatgggtgccttgcgcaaggagggcgagccaggcagcctcttcggcttctctgtggccctgcaccggcagttgcagccccgaccccagagctggctgctggtgggtgctccccaggccctggctcttcctgggcagcaggcgaatcgcactggaggcctcttcgcttgcccgttgagcctggaggagactgactgctacagagtggacatcgaccagggagctgatatgcaaaaggaaagcaaggagaaccagtggttgggagtcagtgttcggagccaggggcctgggggcaagattgttacctgtgcacaccgatatgaggcaaggcagcgagtggaccagatcctggagacgcgggatatgattggtcgctgctttgtgctcagccaggacctggccatccgggatgagttggatggtggggaatggaagttctgtgagggacgcccccaaggccatgaacaatttgggttctgccagcagggcacagctgccgccttctcccctgatagccactacctcctctttggggccccaggaacctataattggaaggggttgctttttgtgaccaacattgatagctcagaccccgaccagctggtgtataaaactttggaccctgctgaccggctcccaggaccagccggagacttggccctcaatagctacttaggcttctctattgactcggggaaaggtctggtgcgtgcagaagagctgagctttgtggctggagccccccgcgccaaccacaagggtgctgtggttatcctgcgcaaggacagcgccagtcgcctggtgcccgaggttatgctgtctggggagcgcctgacctccggctttggctactcactggctgtggctgacctcaacagtgatggctggccagacctgatagtgggtgccccctacttctttgagcgccaagaagagctggggggtgctgtgtatgtgtacttgaaccaggggggtcactgggctgggatctcccctctccggctctgcggctcccctgactccatgttcgggatcagcctggctgtcctgggggacctcaaccaagatggctttccagatattgcagtgggtgccccctttgatggtgatgggaaagtcttcatctaccatgggagcagcctgggggttgtcgccaaaccttcacaggtgctggagggcgaggctgtgggcatcaagagcttcggctactccctgtcaggcagcttggatatggatgggaaccaataccctgacctgctggtgggctccctggctgacaccgcagtgctcttcagggccagacccatcctccatgtctcccatgaggtctctattgctccacgaagcatcgacctggagcagcccaactgtgctggcggccactcggtctgtgtggacctaagggtctgtttcagctacattgcagtccccagcagctatagccctactgtggccctggactatgtgttagatgcggacacagaccggaggctccggggccaggttccccgtgtgacgttcctgagccgtaacctggaagaacccaagcaccaggcctcgggcaccgtgtggctgaagcaccagcatgaccgagtctgtggagacgccatgttccagctccaggaaaatgtcaaagacaagcttcgggccattgtagtgaccttgtcctacagtctccagacccctcggctccggcgacaggctcctggccaggggctgcctccagtggcccccatcctcaatgcccaccagcccagcacccagcgggcagagatccacttcctgaagcaaggctgtggtgaagacaagatctgccagagcaatctgcagctggtccacgcccgcttctgtacccgggtcagcgacacggaattccaacctctgcccatggatgtggatggaacaacagccctgtttgcactgagtgggcagccagtcattggcctggagctgatggtcaccaacctgccatcggacccagcccagccccaggctgatggggatgatgcccatgaagcccagctcctggtcatgcttcctgactcactgcactactcaggggtccgggccctggaccctgcggagaagccactctgcctgtccaatgagaatgcctcccatgttgagtgtgagctggggaaccccatgaagagaggtgcccaggtcaccttctacctcatccttagcacctccgggatcagcattgagaccacggaactggaggtagagctgctgttggccacgatcagtgagcaggagctgcatccagtctctgcacgagcccgtgtcttcattgagctgccactgtccattgcaggaatggccattccccagcaactcttcttctctggtgtggtgaggggcgagagagccatgcagtctgagcgggatgtgggcagcaaggtcaagtatgaggtcacggtttccaaccaaggccagtcgctcagaaccctgggctctgccttcctcaacatcatgtggcctcatgagattgccaatgggaagtggttgctgtacccaatgcaggttgagctggagggcgggcaggggcctgggcagaaagggctttgctctcccaggcccaacatcctccacctggatgtggacagtagggataggaggcggcgggagctggagccacctgagcagcaggagcctggtgagcggcaggagcccagcatgtcctggtggccagtgtcctctgctgagaagaagaaaaacatcaccctggactgcgcccggggcacggccaactgtgtggtgttcagctgcccactctacagctttgaccgcgcggctgtgctgcatgtctggggccgtctctggaacagcacctttctggaggagtactcagctgtgaagtccctggaagtgattgtccgggccaacatcacagtgaagtcctccataaagaacttgatgctccgagatgcctccacagtgatcccagtgatggtatacttggaccccatggctgtggtggcagaaggagtgccctggtgggtcatcctcctggctgtactggctgggctgctggtgctagcactgctggtgctgctcctgtggaagatgggattcttcaaacgggcgaagcaccccgaggccaccgtgccccagtaccatgcggtgaagattcctcgggaagaccgacagcagttcaaggaggagaagacgggcaccatcctgaggaacaactggggcagcccccggcgggagggcccggatgcacaccccatcctggctgctgacgggcatcccgagctgggccccgatgggcatccagggccaggcaccgcctaggttcccatgtcccagcctggcctgtggctgccctccatcccttccccagagatggctccttgggatgaagagggtagagtgggctgctggtgtcgcatcaagatttggcaggatcggcttcctcaggggcacagacctctcccacccacaagaactcctcccacccaacttccccttagagtgctgtgagatgagagtgggtaaatcagggacagggccatggggtagggtgagaagggcaggggtgtcctgatgcaaaggtggggagaagggatcctaatcccttcctctcccattcaccctgtgtaacaggaccccaaggacctgcctccccggaagtgccttaacctagagggtcggggaggaggttgtgtcactgactcaggctgctccttctctagtttcccctctcatctgaccttagtttgctgccatcagtctagtggtttcgtggtttcgtctatttattaaaaaatatttgagaacaaaaaaaaaaaaaaaaaa

SEQ ID NO: 12117 - protein, 1181 aa, Homo sapiens [sequence omitted]

SEQ ID NO: 12118 - DNA, 1407 bp, Rattus norvegicus; identical to SEQ ID NO: 9874
  ref <308>: DATABASE ACCESSION NUMBER: EMBL / X65454
  ref <309>: DATABASE ENTRY DATE: 1996-08-09

SEQ ID NO: 12119 - protein, 431 aa, Rattus norvegicus; identical to SEQ ID NO: 9875
  ref <308>: DATABASE ACCESSION NUMBER: SWISS-Prot / Q64375
  ref <309>: DATABASE ENTRY DATE: 2001-10-16

SEQ ID NO: 12120 - DNA, 2347 bp, Homo sapiens; identical to SEQ ID NO: 9876
  ref <308>: DATABASE ACCESSION NUMBER: EMBL / U47621
  ref <309>: DATABASE ENTRY DATE: 1999-07-01

SEQ ID NO: 12121 - protein, 437 aa, Homo sapiens; identical to SEQ ID NO: 9877
  ref <308>: DATABASE ACCESSION NUMBER: SWISS-Prot / Q92791
  ref <309>: DATABASE ENTRY DATE: 2002-06-15

SEQ ID NO: 12122 - DNA, 3233 bp, Rattus norvegicus; identical to SEQ ID NO: 9894
  ref <308>: DATABASE ACCESSION NUMBER: EMBL / X66022
  ref <309>: DATABASE ENTRY DATE: 1997-02-17

SEQ ID NO: 12123 - protein, 397 aa, Rattus norvegicus; identical to SEQ ID NO: 9895
  ref <308>: DATABASE ACCESSION NUMBER: SWISS-Prot / P56163
  ref <309>: DATABASE ENTRY DATE: 2002-06-15

SEQ ID NO: 12124 - DNA, 1421 bp, Homo sapiens; identical to SEQ ID NO: 9896
  ref <308>: DATABASE ACCESSION NUMBER: EMBL / U43843
  ref <309>: DATABASE ENTRY DATE: 1999-07-01

SEQ ID NO: 12125 - protein, 353 aa, Homo sapiens; identical to SEQ ID NO: 9897
  ref <308>: DATABASE ACCESSION NUMBER: SWISS-Prot / Q92782
  ref <309>: DATABASE ENTRY DATE: 2002-06-15

SEQ ID NO: 12126 - DNA, 3169 bp, Rattus norvegicus
  ref <308>: DATABASE ACCESSION NUMBER: Refseq / NM_012923
  ref <309>: DATABASE ENTRY DATE: 2002-11-05
ccgcacgctgaaccggaggaactgcgcctagtcggggcgctgagggaccctccaccgggacgccggcccctccccgggcctctgctcacttgcccccctgcgagcccgtccccctagtcggcctctcggatcggggacgtggggcgagctgagagcaggcccggggtgggtggtcactgtggagaagacgtggctgtcaagatgatagaagtactgacaactgactctcagaaactgctacaccagctgaacaccctgttggaacaggagtccagatgtcagccaaaggtctgtggcctgaaactgattgagtctgcacatgataatggcctcaggatgactgcaagactccgggactttgaagtcaaagatctactgagtctaactcagttctttggcttcgacacagaaacattttcccttgctgtgaatttactggacagattcttgtctaaaatgaaggtacaggcgaagcatctcggctgtgtcggactgagctgcttttatttggctgtgaaatcgattgaagaggaaaggaacgtcccgctggcaactgatttgatccggataagtcagtataggttcacagtttcagacctgatgagaatggaaaagattgtgttggagaaagtgtgctggaaagtcaaagctactactgccttccaatttctgcagctctattactccctcattcgggagaccttgccatttgaaaggagaaacgatctgaattttgaaagactagaagcccaactgaaggcgtgccactgcaggatcatattttctaaggcaaagccttctgtgctggcgctggcaatcatcgctttggagatccaagcactgaagtatgtggagttaacagaaggagtagaatgtattcagaaacattccaagataagtggccgagatctgaccttctggcaagagcttgtttccaagtgtttaactgaatattcatcaaacaagtgttccaagccgaacggtcagaagttaaaatggatcgtgtctgggcgcactgcacgacaactgaagcacagttattacaggataacccacctcccaacaattcccgaaaccatgggttagttggcaaatctggttgttatcctctgtgtacagaacatttcccagtgagatcgtttttgtgctataacttaaggattgaaatactaccttcaatataaagaatacaggatgaaaacagtaaaggaaacgtgagtttgttggtctagacagagaatactgggaggcattcactgtgtaccgcagtctgaagagaaatgagtatcaaacctctagacacatgctcatactgctgtcaaaggactagcgtagaaaagagagtcctccaaaccggaagtttaaatgtagttactaaaatagcacttcttataacttacatatccccccactgtggcttatttaaagttacagaagtccaagcagaacgacaaaagatgtgacccatatatgaacacattttaatctgttcattgattaggagagtgaatatgaacttgcatgatgcccatgttaggtttctggaaactgccggggtatcttaattctctagtattctccctctgtggcagttgggctaatacaaagtaactatacgcatgagaatataaaatcagtctctgatacatacacatttttaccatcaaaatttcttaatcatagcaaagacttacctttttatgattaggaattttttttttaatgtatggcagcacatgcctttaatcccaacactagggaggcagaggcaggtggatctctttgagttcgaagccaggctggtctttacagtgagttccaggacagctggagagctacagaatggagagacgctgtctcaaaaacactcaaaacaaacaaacaaaccataccagtttgtaggcagacttctgttgggttgggtttgtactgtttgcctatgcagtgggattacagcagcagcaacaaaaactgtccctgaagtctttctctgccactgtgacctgagtttcctatggtacgcgatttactctaggaaacctcagcccctcaccacgttagctgttggcaaatggcctcacagttgcggaaagtcccaattctaggcttgggaaagcaatgcttagatttgaattggcccatgaagcattcaaatcaaggctaaagacataaatgtgaaataaaactgtgaaccttcattttaacattgatctcacttcccagatttaatcaatatatacttaggtggtattaaaaatggtaaactgcctaatttaaatctcaaaatttaaactatgaggtttacatcaaagccaacatttcacaaatgtactttttaaggtattaaaagaggtatttaagcagtaaatggtttcttggcacccataaccaagtaatagttaagttagaggtgggacttttttattgctatgagaattacatttaaacttttgggtgttttataaaaagcagatttcacaagttttgaaaattgtgacctttactgaaatttgttacctttaatatttcttctagaggataggtatttataaaagaaaaattcgtcagaattgctgcctcaatctagtcccatttgagaaaatttgtttctactgtctcaataactggatgaaatatcactctgaaaacttgcctattgcactaaagctagtttaggcttgataaaacactccaggaggtttttaccacagactgtttctattaaaactgctgcttctcatgtacaattttgttttaaaaggaaccgagtacatctgcaaaacctaagtcttaagggacgtcaggaggtaccttcagaattataggatcaccatggtagtggggattctccatgctggccttgaatgtttgatcttcactgctgaaatgtgggtagctcctcagcgccctgtagagcctgagtctacctagaatagctgtaaccattttgacaagtaatggataagaaaattatccattgagaagctaaaaacaaaacaaaacaaaaccaaagaacgggtgtattttattcttaacctttgtaaaccatcactgagaacacttcagttcttcctaacagctgttatgcttcgatttgaaaaaaatactgagtggataaccaactaccatcatgctttgggtacacctttcaataaaattactgaaatgc

SEQ ID NO: 12127 - protein, 294 aa, Rattus norvegicus
  ref <308>: DATABASE ACCESSION NUMBER: SWISS-Prot / P39950
  ref <309>: DATABASE ENTRY DATE: 2001-10-16
MIEVLTTDSQKLLHQLNTLLEQESRCQPKVCGLKLIESAHDNGLRMTARLRDFEVKDLLSLTQFFGFDTETFSLAVNLLDRFLSKMKVQAKHLGCVGLSCFYLAVKSIEEERNVPLATDLIRISQYRFTVSDLMRMEKIVLEKVCWKVKATTAFQFLQLYYSLIRETLPFERRNDLNFERLEAQLKACHCRIIFSKAKPSVLALAIIALEIQALKYVELTEGVECIQKHSKISGRDLTFWQELVSKCLTEYSSNKCSKPNGQKLKWIVSGRTARQLKHSYYRITHLPTIPETMG

SEQ ID NO: 12128 - DNA, 1578 bp, Homo sapiens
  ref <308>: DATABASE ACCESSION NUMBER: Refseq / NM_004060
  ref <309>: DATABASE ENTRY DATE: 2000-11-01
gatcagggccgagttgtctcggcggcgctgccgaggcctccacccaggacagtccccctccccgggcctctctcctcttgcctacgagtcccctctcctcgtaggcctctcggatctgatatcgtggggtgaggtgagcaggcccggggagggtggttaccgctgaggagctgcagtctctgtcaagatgatagaggtactgacaacaactgactctcagaaactgctacaccagctgaatgccctgttggaacaggagtctagatgtcagccaaaggtctgtggtttgagactaattgagtctgcacacgataatggcctcagaatgactgcaagactaagggactttgaagtaaaagatcttcttagtctaactcagttctttggctttgacacagagacattttctctagctgtgaatttactggacagattcctgtctaaaatgaaggtacagcccaagcaccttgggtgtgttggactgagctgcttttatttggctgtaaaatcaatagaagaggaaaggaatgtcccattggcaactgacttgatccgaataagtcaatataggtttacggtttcagacttgatgagaatggaaaagattgtattggagaaggtgtgttggaaagtcaaagctactactgcctttcaatttctgcaactgtattattcactccttcaagagaacttgccacttgaaaggagaaatagcattaattttgaaagactagaagctcaactgaaggcatgtcattgcaggatcatattttctaaagcaaagccttctgtgttggcattgtctatcattgcattagagatccaagcacagaagtgtgtagagttaacagaaggaatagaatgtcttcagaaacattccaagataaatggcagagatctgaccttctggcaagagcttgtatccaaatgtttaactgaatattcatcaaataagtgttccaaaccaaatgttcagaagttgaaatggattgtttctgggcgtactgcacggcaattgaagcatagctactacagaataactcaccttccaacaattcctgaaatggtcccttaactggattattacagcaccaaaaaacttctctgaagcctttctccacaaccttgttctatggattccataatgttacaatggatttaagctatgaagcctcaaaacatcacgagataagcatgatggtctcagacttgggaaaactgcctaatattatgctgtagtggaattatgtttatgatttgaattcatctgtgaaggcattcaaatcaaagctaaaagcctaaatgtgaaatgctaatgacaagcctgagaaggtaaactatgaatcttcatttctatcattgatctaactttagatattggatcaatatatttaggtggtattgaaaatgctattggaggagtcacactaatactatcaactatcagtcttcccacagcttcaatcactgtcattattctaatcctactcctacttaaattttaagttatgaggtttatgtcgaaagcaacatttcacaaatgtacttttaaggcataataagggttaacattctagg

SEQ ID NO: 12129 - protein, 295 aa, Homo sapiens
  ref <308>: DATABASE ACCESSION NUMBER: SWISS-Prot / P51959
  ref <309>: DATABASE ENTRY DATE: 2002-06-15
MIEVLTTTDSQKLLHQLNALLEQESRCQPKVCGLRLIESAHDNGLRMTARLRDFEVKDLLSLTQFFGFDTETFSLAVNLLDRFLSKMKVQPKHLGCVGLSCFYLAVKSIEEERNVPLATDLIRISQYRFTVSDLMRMEKIVLEKVCWKVKATTAFQFLQLYYSLLQENLPLERRNSINFERLEAQLKACHCRIIFSKAKPSVLALSIIALEIQAQKCVELTEGIECLQKHSKINGRDLTFWQELVSKCLTEYSSNKCSKPNVQKLKWIVSGRTARQLKHSYYRITHLPTIPEMVP

SEQ ID NO: 12130 - DNA, 1448 bp, Rattus norvegicus; identical to SEQ ID NO: 9992
  ref <308>: DATABASE ACCESSION NUMBER: EMBL / X73371
  ref <309>: DATABASE ENTRY DATE: 1993-10-05

SEQ ID NO: 12131 - protein, 285 aa, Rattus norvegicus; identical to SEQ ID NO: 9993
  ref <308>: DATABASE ACCESSION NUMBER: SWISS-Prot / Q63203
  ref <309>: DATABASE ENTRY DATE: 2002-06-15

SEQ ID NO: 12132 - DNA, 1338 bp, Homo sapiens
  ref <308>: DATABASE ACCESSION NUMBER: EMBL / X52473
  ref <309>: DATABASE ENTRY DATE: 1998-11-25
ggctgtgactgctgtgctctgggcgccacgtcgctccagggagtgatgggaatcctgtcattcttacctgtccttgccactgagagtgactgggctgactgcaagtccccccagccttggggtcatatgcttctgtggacagctgtgctattcctggctcctgttgctgggacacctgcagctcccccaaaggctgtgctgaaactcgagccccagtggatcaacgtgctccaggaggactctgtgactctgacatgccgggggactcacagccctgagagcgactccattcagtggttccacaatgggaatctcattcccacccacacgcagcccagctacaggttcaaggccaacaacaatgacagcggggagtacacgtgccagactggccagaccagcctcagcgaccctgtgcatctgactgtgctttctgagtggctggtgctccagacccctcacctggagttccaggagggagaaaccatcgtgctgaggtgccacagctggaaggacaagcctctggtcaaggtcacattcttccagaatggaaaatccaagaaattttcccgttcggatcccaacttctccatcccacaagcaaaccacagtcacagtggtgattaccactgcacaggaaacataggctacacgctgtactcatccaagcctgtgaccatcactgtccaagctcccagctcttcaccgatggggatcattgtggctgtggtcactgggattgctgtagcggccattgttgctgctgtagtggccttgatctactgcaggaaaaagcggatttcagccaatcccactaatcctgatgaggctgacaaagttggggctgagaacacaatcacctattcacttctcatgcacccggatgctctggaagagcctgatgaccagaaccgtatttagtctccattgtcttgcattgggatttgagaagaaaatcagagagggaagatctggtatttcctggcctaaattccccttggggaggacagggagatgctgcagttccaaaagagaaggtttcttccagagtcatctacctgagtcctgaagctccctgtcctgaaagccacagacaatatggtcccaaatgaccgactgcaccttctgtgcttcagctcttcttgacatcaaggctcttccgttccacatccacacagccaatccaattaatcaaaccactgttattaacagataatagcaacttgggaaatgcttatgttacaggttacgtgagaacaatcatgtaaatctatatgatttcagaaatgttaaaatagactaacctctaccagcacattaaaagtgattgtttctggg

SEQ ID NO: 12133 - protein, 310 aa, Homo sapiens; identical to SEQ ID NO: 9995
  ref <308>: DATABASE ACCESSION NUMBER: SWISS-Prot / P31994
  ref <309>: DATABASE ENTRY DATE: 2002-06-15

SEQ ID NO: 12134 - DNA, 2400 bp, Rattus norvegicus; identical to SEQ ID NO: 10060
  ref <308>: DATABASE ACCESSION NUMBER: Refseq / NM_012736
  ref <309>: DATABASE ENTRY DATE: 2002-11-14

SEQ ID NO: 12135 - protein, 727 aa, Rattus norvegicus; identical to SEQ ID NO: 10061
  ref <308>: DATABASE ACCESSION NUMBER: SWISS-Prot / P35571
  ref <309>: DATABASE ENTRY DATE: 2002-06-15

SEQ ID NO: 12136 - DNA, 2425 bp, Homo sapiens; identical to SEQ ID NO: 10062
  ref <308>: DATABASE ACCESSION NUMBER: EMBL / AK022596
  ref <309>: DATABASE ENTRY DATE: 2002-08-06

SEQ ID NO: 12137 - DNA, 943 bp, Rattus norvegicus; identical to SEQ ID NO: 10076
  ref <308>: DATABASE ACCESSION NUMBER: EMBL / X78603
  ref <309>: DATABASE ENTRY DATE: 1995-12-05

SEQ ID NO: 12138 - protein, 201 aa, Rattus norvegicus; identical to SEQ ID NO: 10077
  ref <308>: DATABASE ACCESSION NUMBER: SWISS-Prot / Q63055
  ref <309>: DATABASE ENTRY DATE: 2001-10-16

SEQ ID NO: 12139 - DNA, 1559 bp, Homo sapiens; identical to SEQ ID NO: 10078
  ref <308>: DATABASE ACCESSION NUMBER: EMBL / X91504
  ref <309>: DATABASE ENTRY DATE: 1995-12-05

SEQ ID NO: 12140 - protein, 201 aa, Homo sapiens; identical to SEQ ID NO: 10079
  ref <308>: DATABASE ACCESSION NUMBER: SWISS-Prot / Q13795
  ref <309>: DATABASE ENTRY DATE: 2002-06-15

SEQ ID NO: 12141 - DNA, 469 bp, Rattus norvegicus
  ref <308>: DATABASE ACCESSION NUMBER: EMBL / X89699
  ref <309>: DATABASE ENTRY DATE: 1997-04-07
tatctgtcaccctctccactacaccgtgatgatgagacccagactctgtgtcctcctggtggccgtatcatgggtcatcacaaacctgcatgctctcttgcacactctcctcatggttcaactcaccttctgttctcacaatgcagtgcaccacttcttctgtgatccataccctatcctgaagctctcttgttcagacacctttatcaatgacatcacagccttcactgtgggtgggctgacctctatcacaccattcacatgtatcactgtttcatacgcctacattctctccagtgtactgaagttcccatctattcaaggaataaggaaagccctgtccacgtgtgggtctcacctcactgtggtctctctcttctatggagcgatcctgggggtctatatgcacccgtcatctacatactcattacaggacacagtggccactgcctttttcacagtggtgaca

SEQ ID NO: 12142 - protein, 156 aa, Rattus norvegicus
  ref <308>: DATABASE ACCESSION NUMBER: SWISS-Prot / CAA61846
  ref <309>: DATABASE ENTRY DATE: 2001-12-01
ICHPLHYTVMMRPRLCVLLVAVSWVITNLHALLHTLLMVQLTFCSHNAVHHFFCDPYPILKLSCSDTFINDITAFTVGGLTSITPFTCITVSYAYILSSVLKFPSIQGIRKALSTCGSHLTVVSLFYGAILGVYMHPSSTYSLQDTVATAFFTVVT

SEQ ID NO: 12143 - DNA, 972 bp, Homo sapiens
  ref <308>: DATABASE ACCESSION NUMBER: Refseq / NM_003554
  ref <309>: DATABASE ENTRY DATE: 2000-11-28
atgatgggacaaaatcaaaccagcatctcagacttcctgctcctgggcctgcccatccaaccagagcagcaaaacctgtgctatgccctgttcttggccatgtatcttaccaccctcctggggaacctcctcatcattgtcctcattcgactggactcccatctccacacgcctgtgtatttgtttctcagcaacttgtccttctctgacctctgcttttcctcagtcacaatgcccaaattgctgcagaacatgcagaaccaagacccatccatcccctatgcagactgtctgacccaaatgtacttcttcttgtatttttcggatctagagagcttcctccttgtggccatggcctatgaccgctatgtggccatctgcttccccatgcactacaccgccatctgcttcctcctgcactacaccgccatcatgagccccatgctctgtctctccgtggtggcgctgtcctgggtgctgaccaccttccatgccatgttacacactttactcatggccaggttgtgtttttgtgcagacaatgtgatcccccactttttctgtgatatgtctgctctgctgaagctggcctgctctgacactcgagttaatgaatgggtgatatttatcatgggagggctcattcttgtcatcccattcctactcatccttgggtcctatgcaagaattgtctcctccatcctcaaggtcccttcttctaagggtatctgcaaggccttctctacttgtggctcccacctctctgtggtgtcactgttctatgggaccgttattggtctctacttatgcccatcagctaatagttctactctaaaggacactgtcatggctatgatgtacactgtggtgacccctatgctgacccccttcatctacagcctgaggaacagagacatgaagggagccctggaaagggtcatttgtaaaaggaaaaatcccttccttctatga

SEQ ID NO: 12144 - protein, 323 aa, Homo sapiens
  ref <308>: DATABASE ACCESSION NUMBER: Refseq / NP_003545
  ref <309>: DATABASE ENTRY DATE: 2000-11-28
MMGQNQTSISDFLLLGLPIQPEQQNLCYALFLAMYLTTLLGNLLIIVLIRLDSHLHTPVYLFLSNLSFSDLCFSSVTMPKLLQNMQNQDPSIPYADCLTQMYFFLYFSDLESFLLVAMAYDRYVAICFPMHYTAICFLLHYTAIMSPMLCLSVVALSWVLTTFHAMLHTLLMARLCFCADNVIPHFFCDMSALLKLACSDTRVNEWVIFIMGGLILVIPFLLILGSYARIVSSILKVPSSKGICKAFSTCGSHLSVVSLFYGTVIGLYLCPSANSSTLKDTVMAMMYTVVTPMLTPFIYSLRNRDMKGALERVICKRKNPFLL

SEQ ID NO: 12145 - DNA, 472 bp, Rattus norvegicus; identical to SEQ ID NO: 10162
  ref <308>: DATABASE ACCESSION NUMBER: EMBL / X89703
  ref <309>: DATABASE ENTRY DATE: 1997-04-07

SEQ ID NO: 12146 - protein, 157 aa, Rattus norvegicus; identical to SEQ ID NO: 10163
  ref <308>: DATABASE ACCESSION NUMBER: SWISS-Prot / CAA61850
  ref <309>: DATABASE ENTRY DATE: 2002-06-01

SEQ ID NO: 12147 - DNA, 472 bp, Homo sapiens; identical to SEQ ID NO: 10164
  ref <308>: DATABASE ACCESSION NUMBER: EMBL / X89675
  ref <309>: DATABASE ENTRY DATE: 1997-04-07

SEQ ID NO: 12148 - protein, 311 aa, Homo sapiens; identical to SEQ ID NO: 10165
  ref <308>: DATABASE ACCESSION NUMBER: SWISS-Prot / CAA61822
  ref <309>: DATABASE ENTRY DATE: 2002-06-15

SEQ ID NO: 12149 - DNA, 3548 bp, Rattus norvegicus
  ref <308>: DATABASE ACCESSION NUMBER: EMBL / X95986
  ref <309>: DATABASE ENTRY DATE: 1996-11-21
gttacaaggttgtcgaggtgcttgccctcacctgctgaaccatcccaccctgggcagcacttcctgattattaaggcttgtgaaacacctgcctaggtgttcaaatggcgctttacaagcaatctatatgaggcgatagaatcttttgaaatagaaatgacctgtttcctttattttactgtattcctaatatacgtcttattttaatctaaatagccacttgtgtctaatagcaataggaaatgaaacttgacctcaagaagcctatttccagaatgtcaggaaccagtgacaaaacttgtttcccaaatgtaattttctgagcctgcggcatcatgttatctttaaaaaggactaaagggtgcatcatactgctattttgagcacaaaagagcagccttctctgaggcccacacctctgtacacttcgatactaacattccggtaaggcaaagctcttagaagtatctaaagggataccccaggctagtaaggaatgtttcctgcccaaagattacccaatagcttcgttttggtgtcctaagagggaaattcaatacaaattccgattcatcagcaatttcttccagtttctcctacaattcaagttcctacgacttaagtgaaagctttatttttttaaacaccagaaagagttccaatttgcaagttggggaaaatggtgcaaaatttatacaaacactgaagaagaccgtgtcgcatgggcaagctaaatgcatgattaccggtccgacagctgagcaccctcccaccagccttctcctgcagtcttcctggctgctggcttcaaaactccctaggaaaaagcctgagatgtcaatcttatgaccttgatattttcctggctggtttttaaccaccatcaccggcctacatactcagaaataacagacaatctgacaactttcttttcatgctaaactttgataaaaacagccacagtcctgggaaggtgagccacttccaagacatacatcaatttgaccagagacaacacaaccagtccccggcaagccacgcccatggggggaggggcttggactgcgcgtgcgtgctggttccattccaaatcctggccccctggaaaaccggactagaaaagctgtcccgctgcctcccagctgcagagtttaccccaggttctttggtctccgacggcctttctacgcacacgcagccatgtcttccgacagacccgtggcactggtgactggtgctaacaaaggaatcggattcgcgatcgtacgtgatctctgtcgtaaattcttgggggacgtggtcctcacggcgcgggacgagtcacggggccacgaggcggtgaagcagctgcagaccgagggcctgagcccacgcttccaccagctggacatcgacaacccgcagagcatccgcgcgctgcgtgactttctgcttcaggagtacggaggactgaacgtgctggtcaacaatgcgggcatcgccttcaaaggtaagccacagggtgtggtgacttgcccaaagcctgggaccagagtggactgtgcctctctggggagcattactaggatcagaagtactatgatgtaggactctgaaacagatcccctaggagaaacgctgcagggtagcggctgcaggcctccaggaaagcagagccttaatggtcgccatcatttccaggttcccctcaagcggttgttgagtaattgggcttagcaatacttaagttgaattatatctagtaaataaacaagagattgaggggagagagacagggggaaaagtgttacattacgatcctgatacacaaccttcactcagcctcccccagtggtggtgtgtttcaaaaacaatagaacattgtcagatacacaatggggcagtgctgcaactaaacacagaagtacttggaagtggatttctaatgctctggaactgtccgcccagctaactctgttctctttccctctgaaagttgttgaccccacccccttccacattcaagcagaggtgacaatgaaaaccaacttttttggtacccaagatgtctgcaaggagctactccctataataaaaccccaaggtgagtctggcccagctcctctccctctctgcacctgcctctctgccacttggaggtgtggctctgctccttggggtctgatcttttgtagccattgtcgctatctttgcatacccagctcttctttaacctttcagtatgattccaaggtcccttggttccacctcctaacccctgagggggttttaggattccaattatctcaatacacttcacatacatactgacatcacactgctcacaatagcctgtccccacaagtccccaggttggacccaagtgcctccctcagctcagtctcacagcaggtctcagctgtcaagctgcactcctgcaaaccctgagggggcctcctttctgcagcagccttttttcctgggcttctacacctcttacagaacccttcccctcctaaaaatcttttaggaagtagatcaggtctttagcttggttcacaggactctgtaatctgaccttccttcctctgggctcatgttagcgccccatcaacaagcttcacctttctgcaaaacaagctatcacatgactttcgtcgtgaagtgctgtaacacccccaaatctctggatagcatatgaaccactgctcattaaatacacaccagtaaagacaagtgagctgctttggaaatgtgagtctctggtacagagttgactaagtgtagctctctcaagactcctctctccagaatgccctctggaccagacctcatggtcatctggcttcgctacccacccaaaccttgacggcgagacagcagattctgtgctatttgagtccttttctgtgcatccctgtctcaactgaaatcttggggatctaatgtctcaccgtttgtaaagtgttgctcccgtgtccgcatctctacatgatgatgtgttttcaggcagagtggtgaatgtatcaagcagcgtgagtctcagggccctgaaaagctgcagcccggagctgcagcagaagtttcgaagtgagaccatcactgaggaagagctggtggggctcatgaacaagtttatagaggatgcaaagaaaggagtccatgcgaaagaaggctggcccaatagtgcatatggggtcaccaagataggggtgacagtcctgtccagaatctatgccaggaaactcaatgaggagaggagagaggacaagatcctcctgaatgcctgctgccctgggtgggtcagaaccgacatggcaggaccaaaagccaccaaaagcccagaagaaggagcagagacccccgtgtacttggcccttttgcctccaggtgcagaggggcctcacgggcagtttgttcaagataaaaaagttgaaccatggtgaatccaactctcacccccaccccttctatcctgacttggtgaaagccaagggacatttataatataccatcacttctggaaaaataaacataactaagtctttaagcacacaacaggtgtttgc

SEQ ID NO: 12150 - DNA, 1209 bp, Homo sapiens; identical to SEQ ID NO: 2288
  ref <308>: DATABASE ACCESSION NUMBER: EMBL / J04056
  ref <309>: DATABASE ENTRY DATE: 2000-03-04

SEQ ID NO: 12151 - protein, 276 aa, Homo sapiens; identical to SEQ ID NO: 2289
  ref <308>: DATABASE ACCESSION NUMBER: SWISS-Prot / P16152
  ref <309>: DATABASE ENTRY DATE: 2001-10-16

SEQ ID NO: 12152 - DNA, 1758 bp, Rattus norvegicus; identical to SEQ ID NO: 10198
  ref <308>: DATABASE ACCESSION NUMBER: EMBL / X96437
  ref <309>: DATABASE ENTRY DATE: 1996-09-03

SEQ ID NO: 12153 - DNA, 1864 bp, Homo sapiens; identical to SEQ ID NO: 10199
  ref <308>: DATABASE ACCESSION NUMBER: EMBL / X96438
  ref <309>: DATABASE ENTRY DATE: 1998-11-06

SEQ ID NO: 12154 - protein, 156 aa, Homo sapiens; identical to SEQ ID NO: 10200
  ref <308>: DATABASE ACCESSION NUMBER: SWISS-Prot / CAA65304
  ref <309>: DATABASE ENTRY DATE: 2002-06-15

SEQ ID NO: 12155 - DNA, 7225 bp, Rattus norvegicus
  ref <308>: DATABASE ACCESSION NUMBER: EMBL / Y00396
  ref <309>: DATABASE ENTRY DATE: 1999-07-01
aagcttcttcccagaacctggaagcccagcaagcaaatgccctgcccccacccgacctccgccctcgttggcttcgcaaagctgtgatctgtggccagtagagggcacactttactttcgcaaatctgagagccacaacccgggggagggggcggggaaagagtctctgcagcaaaatgcagcctagggattggtggctcttggcgtttgaggcaaaatcctagaggctgtagtcattttgcaatccttaaagctgaattgtgcaatgagctcgatgaaggaagatactatcatccaacagctgaatcctaaattgcaaactcaatggctaatgactactttgaacaatgcgcaccttacacacgctacacgctactgtagtctcttctttttttagggggtagcagtgagaggtttcttaaaatgccttggggcgaggagtcctgaatgaggagactgctttgggttttgatgcgtaggataagcaaatcccgaggaaatatgcactatataataaatctagaaccaaaacacagagcaaaagattcatgtttcacgttggttaataaactaggttatcgtgtatatattaagtgtgtatacctttggggactctacaaaatgcacggcatggtattgaggaaaaagtaaattgggaaattagtgtaaaaattagagtcggcttttaattagtttaacacacacatacgaaggcaaagacacaacgttactttgatctgaccggggccgacctttttttaagtgcataattacgattccagtaataaaaggggaaagtttggggtttgtcctgagaggaaggggttaacggtttcctttattctagggtctccgcaggctccccagatctgggttggcaattctactcctccccctttctgggaagtccgggtttcccccaacccccaatccatggcatattctcgcgtctagcgccttgattcccgcccccccacacccccaacctctaagccggagtctggtgcaaactggctccacaggggcaaagaggatttgcctttagtggaaactggctgtggaactggaactctgagtggaggtgcatggggtgtagactggcagagactcgaccgggaggatccgggtagagcgcgcccaccgccgcagtcctactctactccagctctggaacgcgcagaaagacctacggggcaaggagccgcctccaccccaccccgcctggtggaaggtccgaacgggaggtgttggagtggagggcctttctggcagcaaattgggggattcattctgtaaagaatgtgcccagtcaacatagctgtacgcccaaacgcaaaatacacactgccctccccgagagatgcagtggctgtttattcctaagtggctctccaagtatacgtggcattgagttgctgagcaattttaatgattccaggcatcgtttttctgctcagacctcatctgtcgtaggtcttcaactatcactccacactgagcaagggctcctacataactctttttttttttcgtccttccctttttaaattctgtttccccgaccttagagagacgactggccgcccgagacgtgcgtgacgcggctcagggtacacggcgtattgtgtggagcgaggcagctgttccacctgcggtgactaatacacgcaggacaagaacacagttcagccgagcgctgcgcccgaacaactgtacagaaagggaaaggaccgacgcgcgagcaggagaaaatggtcgggcgcgcagttaattcatgctgcgctattactgtttacaccccgagtcggagtactgggctgcgggactgaggctcctcctctttccccggctccccactagtgcccctcccgagttcccaaagcagagggcgggggagcgagaggaggaaaaaaatagaggtcgggaggggagggagaaagagattctctggcctaatccccgcccacccgccctttataatccgggggtctgcgcggctaaggacccccgggctgcgctgctctccgctgccgcctccgccgcgcccactccgctcgcctcctgcctccaaaagggcaggcgttcgccgaggcttggcgggaaaaagaagcgaggggagggatccggagtcgcagtataaaagaagcttttcgggcgttttttttctgactcgctgtagtaattccagcgagagacagagggagtgagcgggcgggttggaagagcccagtgtgcagagccccactccgggcttcctaggaaggcagctctggagtgagaagggctttgcctccaggcttgctgcctcctcgacccaatcctcccgctgacccaacatcagcggtcgcaaccctcgccgcctctgggaaactttgcccattgcaacgggcagacacttctcactggaacttacaatctgcgagccaggacaggactccccaggcgcaggggagggaatttttgtctatttggggacagtgttctctgcctctgcccgcgatcggctcccctgaaaagagctcctcgcgttatttgaagcctgaatttcctttgggaggtggaaaacccggtaagcacagatctgttggtcttctactgttttctctacgtcctgagtgtagcgaccggttagaacagtctttattcaatttctgtgcttttgacactttactcagagtagttggggtaggccggggcggagttggggtggatctgagtcggggtagaacgacttgtcaagatgacaggaaaggggaaggaaaaaaccggggtgcattttgaaactgtcttccagaggttaccgtgggctgacgctgacccgggccggttggacattcttgctgtgctacattaattgatatttatgtcctttggggggggggtgtcaaagccggaggtctcttcgcggtggccaaaggaagcccttcgtatcctgaggtctttgggaaagggattaccttttgcgtgttctccgcaaaaagcgagaaggctccgtagcctctgacttcccagtctttgggagggcatttaaatttcggcttggtgcatttctgacagcctgagaccaactcgggggtgcgtcccgcccgccaatccccggcggcgattgcaaccggtccctgatccttttaagaagttgccattgggctttaaaaatagtgatcatagtaaaatttaagcctaaccctccgcggtattaggacttggtgttggactagcgcactgaggagaggcaaaactggggcagggatgtgacagattcgttgacttggggaaaaccagagggaatcctcacattcctggttgggatccgcgggtattccccgcgcccctgaattgctagggagactgcggtgagtcttgatctgagctgttcggtaacagctgctaccctcggcggggagagggaagacgccctgcaccgggtgctgaatcgctgtggggtctctggcgcagtggcgtcgcggtttagagtgtagcagggaggtgtctcttattatttgacaccccctcccctttggagaggcttgttagagcctgagactgagctctcccctccaagtcagcaataggaaagaaaagccggcaaaggaaggaaggggggcgcgctgggggtggagaaagaggagggcggagaggggcggcggcgccggctgggtaagagccgggcgacggcgcgagtagggacccggacccggtcggcggcgcaaagagccggcaccggagggggccgagcaccgcggcgcctctcgcctttctccttcaggtggcgcaaaactttgcgcctaggcttttggcagactgtattccctacagtcgcctccctcagcctctgaaggaggccaaggccgatggcgattcctgggcgtctgcagtgctaagtccctgctctaaggaggcggggactccgagcagctgctagtccgaccagcgtcactgatagtagggagtaaaagagtgcattccccccaaccacacacacacacacacacacacacacacacacacacacacacacacacacacttggaagtacagcaggctgaaaggggagtggttcaggattggggtacgcgctgcgccaggtttccgcatcaaccagagctgggtaactctagacttgcttcccttgctgtgccccctccaacagacagtcacgacgatgcccctcaacgtgagcttcgctaacaggaactatgacctcgactacgactcggtgcagccctatttcatctgcgacgaggaagagaatttctatcaccagcaacagcagagcgagctgcagccgcccgcacccagtgaggatatctggaagaaattcgagctgctgcccaccccgcccctgtcccccagccgccgctccgggctctgctctccgtcctatgtcgcggtcgctacgtccttctccccaagggaggacgatgacggtggcggtggcaacttctccaccgccgatcagctggagatgatgaccgagctacttggaggagacatggtgaatcagagcttcatctgcgatcctgacgatgagaccttcatcaagaacatcatcatccaggactgtatgtggagcggcttctcggccgctgccaaactggtctccgagaagctggcctcttaccaggctgcgcgcaaagacagcaccagcctgagccccgcccgcgggcacagcgtctgctccacctccagcctgtacctgcaggacctcaccgccgcagcgtccgagtgcatcgacccctcagtggtcttcccctacccgctcaacgacagcagctcgcccaaatcctgtacctcgtccgattccacggccttctcttcttcctcggactcgctgctgtcctccgagtcctccccacgggccacccctgagcccctagtgctgcatgaagagacaccgcccaccaccagcagcgactctggtaagccgccccaaccccagcagggtaggaagccagaggttggatggacctccttctcattggcattaattcaattggcccccgggctcaccctttctttcccttcggtctaagctcttcatccctggactcctgtgcttcagatatccctccccttcccccagaccgccctggttgtcagccccacccccacccttcccacccctcaggaatttcatttgggtttttaaatcttctggcttatctttcaactcaatccactccctttacccctcctaggcattttaattacccagagaagggtgtgaaggaggatagggaactgatcctgagaagagtgaatgaattacctgcttttctttgacttcagaagaatatttgaatttaatgtctacaagacccaagagaagcaatgacagaagcaggacagcctttagcctcagagccaggcactagtgaaagatcctgaagagttgaagagctgttttccctccatcccgttttgaacacttcaaagcaaatcctcttcagtttggattttcgtaccccctccctccccaaatgctcgccccaccactgccaccaccaggacaggacgtttggcaaaaccacaagactttactattgcacttccagtaatatagggagttggtaaagtcatagcaagatatttgcagctatcgcctacaggacctgaagggttcttggtgaagtcccttaaaaatgggaggtgcttgggaatgtgctttgctttgggtgtgtctgaagcctcattaagtcttaggtaagaattggcaacgatgccatatcctggtacatggtaattttctcacctgtgccctaaccctgttctacctttctgggaaacgggaggatggtgtctagatctggttcttacttctcaatcctttccaacttggcacttggatagcatcggtcaaacccccatctgggattcaggaggcattgctaactaatcttccacttccttccttacagaagaagaacaagatgatgaggaagaaattgatgtggtgtctgtggaaaagaggcaaccccctgccaagaggtccgagtcagggtcatccccatcaagaggccacagcaaacctccacacagcccactggtcctcaagaggtgccatgtctctactcaccagcacaattatgcagcacccccctccacaaggaaggactatccagctgccaagagggccaagttggacagtggcagggtcctgaaacagatcagcaacaaccgcaaatgctccagccccaggtcctcagacaccgaggaaaacgacaagaggcggacacacaacgtcttggaacgtcagaggagaaacgagctgaagcgtagcttttttgccctgcgcgaccagatccctgagttggaaaacaacgaaaaggcccccaaggtagttatcctcaaaaaagccaccgcctacatcctgtccgttcaagcagatgagcacaaactcatctcagaaaaggacttactgaggaaacggcgagaacagttgaaacacaaactcgaacagcttcgaaactctggtgcataaactgaccggaagtgaggaggagctggaatctcgagtgtaaggagaacggttccttctgacagaacttggacttcaaaaaatgcatgctcaaagcctaacctcacaaccttggctggggctttgggacttcagccataatgttaactgcctcaaagttaaggcataaaagaacttttttttatgcttcccatcttctttctttttcctttaacagatttgtatttaattgttttttttaaaaaaatcttccggtgtacatagggcctttaaatgtaaataactttaataaaacgtttataacagttatacaagattttaagacatgtatgataaaccataattttttttatttaaagaccttttcatttttaaagttgatttttttctattgtttttagaaaaaataaaataattggaaaaaatataattgagccaactcttaaatggtgttttcttttttttttttcctccaatttctcttcctcaactatagatgaacagaactgaccgtcttcccaggacgggtttacaagggtgggaaggggttatcttaaaatggggcgggggaggggggtgcctcaagacctctaagttcccagtgttatgagatcctttctgtggatgctgataggatgagagttgagaaagggcaaaaggcaagtgaggttagatacaaggaacagggaagcaagaggttaaagatagcagacagggaagagatggcagaatgaatctcctgcagtt

SEQ ID NO: 12156 - protein, 439 aa, Rattus norvegicus
  ref <308>: DATABASE ACCESSION NUMBER: SWISS-Prot / TVRTMC
  ref <309>: DATABASE ENTRY DATE: 2001-10-16
MPLNVSFANRNYDLDYDSVQPYFICDEEENFYHQQQQSELQPPAPSEDIWKKFELLPTPPLSPSRRSGLCSPSYVAVATSFSPREDDDGGGGNFSTADQLEMMTELLGGDMVNQSFICDPDDETFIKNIIIQDCMWSGFSAAAKLVSEKLASYQAARKDSTSLSPARGHSVCSTSSLYLQDLTAAASECIDPSVVFPYPLNDSSSPKSCTSSDSTAFSSSSDSLLSSESSPRATPEPLVLHEETPPTTSSDSEEEQDDEEEIDVVSVEKRQPPAKRSESGSSPSRGHSKPPHSPLVLKRCHVSTHQHNYAAPPSTRKDYPAAKRAKLDSGRVLKQISNNRKCSSPRSSDTEENDKRRTHNVLERQRRNELKRSFFALRDQIPELENNEKAPKVVILKKATAYILSVQADEHKLISEKDLLRKRREQLKHKLEQLRNSGA

SEQ ID NO: 12157 - DNA, 1023 bp, Homo sapiens
  ref <308>: DATABASE ACCESSION NUMBER: EMBL / M13929
  ref <309>: DATABASE ENTRY DATE: 1999-07-02
ttatgcctctatcattcctccctatctacactaacatcccacgctctgaacgcgcgcccattaatacccttctttcctccactctccctgggactcttgatcaaagcgcggccctttccccagccttagcgaggcgccctgcagcctggtacgcgcgtggcgtggcggtgggcgcgcagtgcgttctcggtgtggagggcagctgttccgcctgcgatgatttatactcacaggacaaggatgcggtttgtcaaacagtactgctacggaggagcagcagagaaagggagagggtttgagagggagcaaaagaaaatgcagcgggcgggcactttgcactggaacttacaacacccgagcaaggacgcgactctcccgacgcggggaggctattctgcccatttggggacacttccccgccgctgccaggacccgcttctctgaaaggctctccttgcagctgcttagacgctggatttttttcgggtagtggaaaaccagcctcccgcgacgatgcccctcaacgttagcttcaccaacaggaactatgacctcgactacgactcggtgcagccgtatttctactgcgacgaggaggagaacttctaccagcagcagcagcagagcgagctgcagcccccggcgcccagcgaggatatctggaagaaattcgagctgctgcccaccccgcccctgtcccctagccgccgctccgggctctgctcgccctcctacgttgcggtcacacccttctcccttcggggagacaacgacggcggtggcgggagcttctccacggccgaccagctggagatggtgaccgagctgctgggaggagacatggtgaaccagagtttcatctgcgacccggacgacgagaccttcatcaaaaacatcatcatccaggactgtatgtggagcggcttctcggccgccgccaagctcgtctcagagaagctggcctcctaccaggctgcgcgcaaagacagcggcagcccgaaccccgcccgcggccacagcgtc

SEQ ID NO: 12158 - DNA, 3628 bp, Rattus norvegicus; identical to SEQ ID NO: 10261
  ref <308>: DATABASE ACCESSION NUMBER: EMBL / Y07704
  ref <309>: DATABASE ENTRY DATE: 2000-03-23

SEQ ID NO: 12159 - protein, 360 aa, Rattus norvegicus; identical to SEQ ID NO: 10262
  ref <308>: DATABASE ACCESSION NUMBER: SWISS-Prot / CAA68971
  ref <309>: DATABASE ENTRY DATE: 2003-02-01

SEQ ID NO: 12160 - DNA, 1442 bp, Homo sapiens; identical to SEQ ID NO: 10263
  ref <308>: DATABASE ACCESSION NUMBER: EMBL / BC017969
  ref <309>: DATABASE ENTRY DATE: 2002-09-02

SEQ ID NO: 12161 - protein, 362 aa, Homo sapiens; identical to SEQ ID NO: 10264
  misc_feature (1)..(362): Xaa=Unknown amino acid

SEQ ID NO: 12162 - DNA, 1711 bp, Rattus norvegicus; identical to SEQ ID NO: 10277
  ref <308>: DATABASE ACCESSION NUMBER: EMBL / Y09333
  ref <309>: DATABASE ENTRY DATE: 1998-02-03

SEQ ID NO: 12163 - protein, 453 aa, Rattus norvegicus; identical to SEQ ID NO: 10278
  ref <308>: DATABASE ACCESSION NUMBER: SWISS-Prot / O55171
  ref <309>: DATABASE ENTRY DATE: 2001-10-16

SEQ ID NO: 12164 - DNA, 1143 bp, Homo sapiens; identical to SEQ ID NO: 10279
  ref <308>: DATABASE ACCESSION NUMBER: EMBL / L40401
  ref <309>: DATABASE ENTRY DATE: 1997-02-12

SEQ ID NO: 12165 - protein, 421 aa, Homo sapiens; identical to SEQ ID NO: 10280
  ref <308>: DATABASE ACCESSION NUMBER: SWISS-Prot / P49753
  ref <309>: DATABASE ENTRY DATE: 2002-06-15

SEQ ID NO: 12166 - DNA, 607 bp, Rattus norvegicus; identical to SEQ ID NO: 10351
  ref <308>: DATABASE ACCESSION NUMBER: EMBL / Y16188
  ref <309>: DATABASE ENTRY DATE: 1999-02-02

SEQ ID NO: 12167 - protein, 775 aa, Rattus norvegicus; identical to SEQ ID NO: 10352
  ref <308>: DATABASE ACCESSION NUMBER: SWISS-Prot / CAA76114
  ref <309>: DATABASE ENTRY DATE: 2002-06-15

SEQ ID NO: 12168 - DNA, 2872 bp, Homo sapiens; identical to SEQ ID NO: 10353
  ref <308>: DATABASE ACCESSION NUMBER: EMBL / Y16187
  ref <309>: DATABASE ENTRY DATE: 1999-02-02

SEQ ID NO: 12169 - protein, 775 aa, Homo sapiens; identical to SEQ ID NO: 10354
  ref <308>: DATABASE ACCESSION NUMBER: SWISS-Prot / CAA76113
  ref <309>: DATABASE ENTRY DATE: 2002-06-15

SEQ ID NO: 12170 - DNA, 1644 bp, Rattus norvegicus; identical to SEQ ID NO: 10387
  ref <308>: DATABASE ACCESSION NUMBER: EMBL / Z11995
  ref <309>: DATABASE ENTRY DATE: 1999-09-14

SEQ ID NO: 12171 - protein, 357 aa, Rattus norvegicus; identical to SEQ ID NO: 10388
  ref <308>: DATABASE ACCESSION NUMBER: SWISS-Prot / Q99068
  ref <309>: DATABASE ENTRY DATE: 2001-10-16

SEQ ID NO: 12172 - DNA, 1832 bp, Homo sapiens; identical to SEQ ID NO: 10389
  ref <308>: DATABASE ACCESSION NUMBER: EMBL / AK027025
  ref <309>: DATABASE ENTRY DATE: 2000-09-29

SEQ ID NO: 12173 - protein, 357 aa, Homo sapiens; identical to SEQ ID NO: 10390
  ref <308>: DATABASE ACCESSION NUMBER: SWISS-Prot / P30533
  ref <309>: DATABASE ENTRY DATE: 2002-06-15

SEQ ID NO: 12174 - DNA, 2990 bp, Rattus norvegicus; identical to SEQ ID NO: 10439
  ref <308>: DATABASE ACCESSION NUMBER: EMBL / Z36276
  ref <309>: DATABASE ENTRY DATE: 1994-10-17

SEQ ID NO: 12175 - protein, 762 aa, Rattus norvegicus; identical to SEQ ID NO: 10440
  ref <308>: DATABASE ACCESSION NUMBER: SWISS-Prot / Q64595
  ref <309>: DATABASE ENTRY DATE: 2000-05-30

SEQ ID NO: 12176 - DNA, 3328 bp, Homo sapiens; identical to SEQ ID NO: 10441
  ref <308>: DATABASE ACCESSION NUMBER: EMBL / X94612
  ref <309>: DATABASE ENTRY DATE: 1996-05-15

SEQ ID NO: 12177 - protein, 763 aa, Homo sapiens
  misc_feature (1)..(763): Xaa=Unknown amino acid
MGNGSVKPKHSKHPDGHSGNLTTDALRNKVTELERELRRKDAEIQEREYHLKELREQLSKQTVAIAELTEELQNKCIQLNKLQDVVHMQGGSPLQASPDKVPLEVHRKTSGLVSLHSRRGAKAGVSAEPTTRTYDLNKPPEFSFEKARVRKDSSEKKLITDALNKNQFLKRLDPQQIKDMVECMYGRNYQQGSYIIKQGEPGNHIFVLAEGRLEVFQGEKLLSSIPMWTTFGELAILYNCTRTASVKAITNVKTWALDREVFQNIMRRTAQARDEQYRNFLRSVSLLKNLPEDKLTKIIDCLEVEYYDKGDYIIREGEEGSTFFILAKGKVKVTQSTEGHDQPQLIKTLQKGEYFGEKALISDDVRSANIIAEENDVACLVIDRETFNQTVGTFEELQKYLEGYVANLNRDDEKRHAKRSMSNWKLSKALSLEMIQLKEKVARFSSSSPFQNLEIIATLGVGGFGRVELVKVKNENVAFAMKCIRKKHIVDTKQQEHVYSEKRILEELCSPFIVKLYRTFKDNKYVYMLLEACLGGELWSILRDRGSFDEPTSKFCVACVTEAFDYLHRLGIIYRDLKPENLILDAEGYLKLVDFGFAKKIGSGQKTWTFCGTPEYVAPEVILNKGHDFSVDFWSLGILVYELLTGNPPFSGVDQMMTYNLILKGIEKMDFPRKITRRPEDLIRRLCRQNPTERLGNLKNGINDIKKHRWLNGFNWEGLKARSLPSPLQRELKGPIDHSYFDKYPPEKGMPPDELSGWDKDFX

SEQ ID NO: 12178 - DNA, 707 bp, Rattus norvegicus; identical to SEQ ID NO: 10477
  ref <308>: DATABASE ACCESSION NUMBER: EMBL / Z75029
  ref <309>: DATABASE ENTRY DATE: 1996-08-06

SEQ ID NO: 12179 - protein, 641 aa, Rattus norvegicus; identical to SEQ ID NO: 2952
  ref <308>: DATABASE ACCESSION NUMBER: SWISS-Prot / Q07439
  ref <309>: DATABASE ENTRY DATE: 2001-10-16

SEQ ID NO: 12180 - DNA, 168 bp, Homo sapiens; identical to SEQ ID NO: 10479
  ref <308>: DATABASE ACCESSION NUMBER: EMBL / M24743
  ref <309>: DATABASE ENTRY DATE: 2000-03-04

SEQ ID NO: 12181 - DNA, 588 bp, Rattus norvegicus; identical to SEQ ID NO: 33
  ref <308>: DATABASE ACCESSION NUMBER: EMBL / AA799389
  ref <309>: DATABASE ENTRY DATE: 2000-03-03

SEQ ID NO: 12182 - protein, 219 aa, Rattus norvegicus; identical to SEQ ID NO: 34
  ref <308>: DATABASE ACCESSION NUMBER: Refseq / NP_112353
  ref <309>: DATABASE ENTRY DATE: 2001-04-11

SEQ ID NO: 12183 - DNA, 3556 bp, Rattus norvegicus
  ref <308>: DATABASE ACCESSION NUMBER: EMBL / AB000517
  ref <309>: DATABASE ENTRY DATE: 1997-09-05
tgaaaacctgaatttaatgtgagattgggggagccccatccctccctttttaccacccactcatccggcctgttgttagctgggtgagggctgcccccagtctccgtcctgcggctctgggtaccatcctgtttctttgggctcattcagcctcctgggcctgtctctctctgaatctccttcttgcatattcatacagtgcctgcttgcgctcctgcaggctctcctgacgggcccaggaagacttggcaaatgttagggctgtgggctgaggggtcaccaggccagagctggggaactttggggcagaggctgtgggcagggactgagatccctcagtgacatcttcaggcatgaaagccacagccccctcaagcagattggtgatggtcaagtctacacacccagtcctagccaggtctctctggatgacattcaatggcacatggggcaaaacctccttgactctttgagcgagaatggtcagttgcacatcagaagaagggctgggaggagaaggaaaagaagactgcactgactgggggcgtaatctggggtgtctctgtcgcttcatgtgttctgctttgtctgctggcgtgagccgtgtccctatctggcccaattctttggccaccagctgttgtacacggagtgcaaactcctcattctcttcccccagctgtcgacgaatgggatgaagccaccttacttgatacaccgtgaaagggacgaaaagtgaccacagcagttctgagaccccaggaggcatctgacaccgtcacagagaccaggggtctctgaacttgtagggtaagaggttgtaccacatcctggatagaaaatggccacgaactgaaacgcaggagcccttctcggccattggtgccctcttcctcggggaagagcaccaaaggtgtgggtggaagcctcgtggaagcacagaatttcttgagtgactccaccaactccacccgcctatccatctccatgaagccccgagaccaacatacaaagctggggggactattgagtagaggggtgctacaggtggtgagaaggttgactatgttggtggtcaaaaggtgttacatggttggaaataaggaccctgacgcggtgatcccggagtccggagtcctcctgtcgggccacgagccccagtaccgcacacatggttcgtaccacgaacctgcggaggacgctgtcaggaagagcacagctgaccaggaagacgtggagcccgaggaagagtcgcagaaccaggaggcagaggccgaccggcgcgtagagcaatagcgcgagcagcaggaagccgtcactcgggagccggtgcgagtcaaagagccgctccggccccggagctgggggaggttccatcgcaaccgcttcaggaaagtggggctgctgcgggagctcggccgcggggaggtggggcggtcgggccgggtggcgcggtcgcgaggcgcgagggtgggagggcccggctgctcctccgccccctggggacagtgcgtcgaaccgcgcacctggcaacggcgccgcgtccccgcccgcgccggtccgcaccccctgccggcggcctcgagcgctcgctcgttgatgccgttctgggggtgacccggcgcggctccgcggtggcggggcgctagacgacgccagcccagcgacgcgagagcgggacatgctggagctacggcaccgcgggggctgccccggccccgggggagcggggacgccgccaccccgcgagggagaggcggccggcggcgaccacgaaaccgagagcaccagcgacaaagaaacagatattgatgacaggtatggagatctcgatgccagaggagattccgatgttcctgaggtcccaccatcctcagacaggacccccgagattctcaagaaagccctgtctggactgtcatcaagatggaagaactggtggattcgtgggatcctcaccctgaccatgatctccctcttcttcctgatcatctatatggggtccttcatgctgatgcttctggttctgggcatccaggtgaagtgcttccaggagatcataaccatcgggtacagggtctaccactcctacgacctcccgtggtttagaacactaagttggtacttcctcctatgtgtgaactacttcttctatggagagacagtggcagattacttcgccacgttcgttcagagggaggagcagctgcagttcctcattcgctaccacaggttcatatccttcgccctctacctggcaggtttctgcatgttcgtcctgagcttggtgaagaaacactaccgactacagttctatatgttcgcatggactcacgtcactttactgataaccgtcactcagtcacatcttgtcatccaaaatctgtttgagggcatgatatggttccttgtccccatatcaagcgtcatctgcaatgatatcacggcttacctttttggatttttttttggaagaactcctttaattaagctgtctcctaagaagacctgggaaggattcattggtggtttcttctccacagtcatatttggattcattgctgcctatgtgttggtccaagtatcagtactttgtggtgcccggtgggagtaccgaagcgacgtcaactccttcgtgacagaatgtgagccctcagaactgttccagcttcagaattactccctccctccgttcctacaggcagtgttgagccgggagaccgtgagcttgtaccccttccagatacacagcattgccctttcaacatttgcatcactgatcggcccattcggaggcttcttcgccagtggattcaaaagagctttcaaaatcaaggactttgcaaacactattcctgggcatggagggataatggacaggttcgattgtcagtatttgatggcgacgttcgtgcacgtgtacatcaccagcttcatcaggggtccgaatcccagcaaagtgctccagcagctcctagtgcttcagccagagcagcagttaaacatctacagaaccctgaagatacatctcacggagaaaggcatcctgcagcccacctggaaggtgtagctgtcctgaggggacagactgctgaggaggaaggagctcacagagcagctccgactgaagtcttgcactgagccagcctggggctagaaactcagtaggatgcaggttttggcagatacgaatgtttctctttctctgaaattactgtgaatatttaacaaacacgagatctgagacgagtgcgcatcagtcgccgccgtgaaagatccgtgcttttcttaagatgtattttccaatgttaagttcctccgcccttactggccgggctccatgatgtaggaggtttaaagagtccaagcactgtcacctgagggctgagccccccttaggctcgtgcctggcagtgtgatccttctcacaaacactgacctttgcactgactgggagctgcctctctgtggctggggatgctcagcaggcaccctgggaagcgaggcctagggcttcctcctctactgacctcaggcatttctgcaggctgagtta

SEQ ID NO: 12184 - protein, 461 aa, Rattus norvegicus; identical to SEQ ID NO: 168
  ref <308>: DATABASE ACCESSION NUMBER: SWISS-Prot / BAA22085
  ref <309>: DATABASE ENTRY DATE: 2002-06-15

SEQ ID NO: 12185 - DNA, 2309 bp, Homo sapiens
gcggggcgggaggggcctgcgcggcggcgggagcccagagccgcgctaaagcgggtcaagcgtcctccttttctccccgccccttctcctcctcctacctgggcctctgcgtggagacgcgcacctggcaaccggaggccgcgtctccgccttctctgctcgcgcctggcgcccggagcctgcccgggacctccgccggagccgcgctcgctgcaggcggcctcgagcgctctctcgttgatgccgttttggaggtgaccggcgcggcggccgctctatggtggggccgcgttagtggctgcggctccgcgggactccagggcgcggctgcgaggtggcggggcgccccgcctgcagaaccctgcttgcagctcaggtttcggggtgcttgaggaggccgccacggcagcgcgggagcggaagatgttggagctgaggcaccggggaagctgccccggccccagggaagcggtgtcgccgccacaccgcgagggagaggcggccggcggcgaccacgaaaccgagagcaccagcgacaaagaaacagatattgatgacagatatggagatttggattccagaacagattctgatattccggaaattccaccatcctcagatagaacccctgagattctcaaaaaagctctatctggtttatcttcaaggtggaaaaactggtggatacgtggaattctcactctaactatgatctcgttgtttttcctgatcatctatatgggatccttcatgctgatgcttcttgttctgggcatccaagtgaaatgcttccatgaaattatcactataggttatagagtctatcattcttatgatctaccatggtttagaacactaagttggtactttctattgtgtgtaaactactttttctatggagagactgtagctgattattttgctacatttgttcaaagagaagaacaacttcagttcctcattcgctaccatagatttatatcatttgccctctatctggcaggtttctgcatgtttgtactgagtttggtgaagaaacattatcgtctgcagttttatatgttcgcatggactcatgtcactttactgataactgtcactcagtcacaccttgtcatccaaaatctgtttgaaggcatgatatggttccttgttccaatatcaagtgttatctgcaatgacataactgcttacctttttggatttttttttgggagaactccattaattaagttgtctcctaaaaagacttgggaaggattcattggtggtttcttttccacagttgtgtttggattcattgctgcctatgtgttatccaaataccagtactttgtctgcccagtggaataccgaagtgatgtaaactccttcgtgacagaatgtgagccctcagaacttttccagcttcagacttactcacttccaccctttctaaaggcagtcttgagacaggaaagagtgagcttgtaccctttccagatccacagcattgcactgtcaacctttgcatctttaattggcccatttggaggcttctttgctagtggattcaaaagagccttcaaaatcaaggattttgcaaataccattcctggacatggtgggataatggacagatttgattgtcagtatttgatggcaacttttgtacatgtgtacatcacaagttttataaggggcccaaatcccagcaaagtgctacagcagttgttggtgcttcaacctgaacagcagttaaatatatataaaaccctgaagactcatctcattgagaaaggaatcctacaacccaccttgaaggtataactggatccagagagggaaggactgacaagaaggaattattcagaaaaacactgacagatgttttataaattgtacagaaaaatagttaaaaatgcaataggttgaagttttggagatatgtttctctctgaaattactgtgaatatttaacaaacacttacttgatctatgttatgaaataagtagcaaattgccagcaaaatgtcttgtaccttttctaaagtgtattttctgatgtgaacttccttccccttacttgctaggtttcataatttaaaagactggtatttaaaagagtcaaacactataaaatgagtaagttgacgatgttttaagattgcacctggcagtgtgcctttttgcacaaatatttacttttgcacttggagctgcttttaattttagcaaaatgttttatgcaaggcacaataggaagtcagttctcctgcacttcctcctcatgtagtctggagtactttctaaagggcttagttggattt

SEQ ID NO: 12186 - protein, 461 aa, Homo sapiens; identical to SEQ ID NO: 170

SEQ ID NO: 12187 - DNA, 4194 bp, Rattus norvegicus
  ref <308>: DATABASE ACCESSION NUMBER: EMBL / AB003357
  ref <309>: DATABASE ENTRY DATE: 2000-04-29
tcggcgccccgccttctccggggagcgcccggcgggagcggccggaccccgggctcgcgcgggagacgacgcgccacaaactttgccttttattgttcctagccctttaagtgcaaggggctctgttgggctggaaaaatgtccttcttcaatttccgtaagatcttcaagttggggagcgagaagaagaagaaacagtacgaacacgtgaagagagacctgaaccccgaggagttttgggagattatcggagagctgggcgacggagcctttgggaaagtgtataaggcccagaataaggagaccaatgttttagctgctgcaaaggtgattgacaccaaatctgaagaagaacttgaagattatatggttgagattgacatattagcatcttgtgatcacccaaacatagtcaagcttctagatgccttctattatgagaacaatctttggatcctcattgaattttgtgcagggggagcagtagatgccgtgatgcttgaacttgagagaccattaactgagtcccaaattcaagtagtttgcaagcagacattagaggcgttgaattacctacatgacaataaaatcatccacagagatctaaaagctggcaatattctctttaccttagatggagacattaaattagcggattttggagtgtcagctaagaataccaggacaattcaaaggagggattcatttattggcacaccgtattggatggctcctgaagtcgtcatgtgtgagacatcgaaggacagaccctatgactacaaagcggacgtttggtccctgggaatcactttaatagaaatggctgagatagagccgcctcatcatgagctaaacccaatgcgagtgctgctgaaaatagcaaagtcggagccccccacactagcacagccatccagatggtcttcaaattttaaggactttctaaagaaatgcttggaaaagaatgtggatgcgcggtggaccacatcccagctgttacagcatccctttgttaccgttgattccaacaaaccagtccgagaattgattgctgaggcgaaggctgaagtaacagaagaagttgaagatggcaaagaggaagatgacgatgatgagacagagagtgctctgccaatacctgcgaataaacgcgcctcctctgacctcagcattgccagctctgaggaagataagctttcacaaaatgcttgtattttggaatctgtgtcagaaagaacagaacacaatacttctggggataaatttagcaacaaagttcttagtgagaagcctactcctgagggacctgagaagactgtggatgtggatgggcctgcaaatgatgttaacttagaaactgtggctgaaccaaatgaccaagcggtaggattccatgagaatgggagagagaagaaaagaccccaactggaaagtcaaccagatacagaagaccaacaaactgtggatgttaatttagtcggtgaaggaaatgacagcaatatagtaattttagaaacaaacactgattgtctgaaaccagaggaagacagaaatgaagaaaaccaagagataattgagaataaacttacacaatctgaagaaattaaagatatacatattcaaacaatggacttagtttctcaagaaactggagaaaaagaggcagattttcaggcaattgacaatgaagttgggtttacaaaggaagaaacccaagagaaattgggaaaagatgataaaactcacaaagttgtgatcagtgatataaccagtgaggtgggaacagacgagcctccaggtgatacccagaagtctgctgagcagagccaggatgcagagggtggggctggggaagaagccccggagcctgcccagacactaacagagaaggccactgagggccctgaggctcatggtgctgaggaagagcctcgtagtggagagagagtagaggataagcagctagagcagcagtctgcagtgtgtgaaggtgagggacaggtaaccagcacttcagagagcacacgggcaaccacggaggaaccagagactgacgaagttgaccaagtcagcgagtcaaatagcattgaggaactagagagacttggagttactggtgctgaggaacaggctctagggagcaaaggggaggctgctacggagctagatttggagagagaagaaaatgcacaggaactgccagttaaagcagagccccaagctcctgcagcatcgcaggccagcgaacctccccctgtcttaatacccagtattaatattcattcggaaaacacagaaaataaaggagaaatgggtgctttgccaaaacctgaaaccatactgccaccagagcctgaaaatggaaagggaaatgacacggactcagggactgggtccactgtggagaacagcagcagtgacctgaacttgtccatctctagcttcctgagcaaaaccaaggacagtggctcggtgtctctgcaggagacaagaagacagaagaaaacattgaagaaaacacgtaaatttattgttgatggagtagaagtgagtgtgacaacatcaaagatagttacagacagcgactctaaaaccgaggaattgaggtttctcaggcgtcaggaacttcgagagctaaggcttctccagaaggaagagcagaaagcccagcagcagctcaacgggaaattgcagcagcagcgcgagcagatcttcaggcgctttgagcaggagatgctgagtaagaagcgacaatatgaccaagaaattgagaatctagagaagcagcagaaacagacaattgaacgactagaacaagaacacacaaaccgcctgagagacgaagctaagcgcatcaaaggagagcaggagaaggagctgtccaaattccagaatatgctaagaaaccgaaagaaggaggaacaagaatttgttcagaagcaacagcaagagttagacggcgctctgaaaaagatcatccagcagcagaaggcagagttggccaatattgagagagagtgcttgaataacaagcagcagctcctgagagcccgagaagctgcaatttgggagcttgaagaacgacatttacaagaaaagcaccagctgcttaaacagcaacttaaagatcagtatttcatacagagacatcagctgcttaaacgccatgagaaggaaacagaacaaatgcagcgttacaatcaacgacttattgaagaattgaagaacagacagactcaggaacgagctagactgcccaagattcagagaagtgaagccaagacacgaatggccatgtttaaaaaaagtttgaggattaactcaacagctacaccagaccaggaccgtgaaaaaattaaacagtttgctgcacaggaagaaaagagacagaaaaatgagagaatggctcagcatcaaaaacatgagagtcagatgcgggaccttcagttgcagtgtgaagccaacgtccgagagctgcaccagctgcagaatgaaaaatgccacctgttggttgaacatgagactcagaaactgaaggagttagatgaggagcacagccaagagctcaaggagtggagagagaagctgaggcccaggaagaagacactggaggaagagtttgccaggaaacttcaggaacaggaagtgttctttaaaatgaccggggagtccgaatgcctcaacccctcagcgcagagccggggctgtttacaaacgtctcaccccagcagtaccagggcaccagcgtgggcaggatgaagcacatgagcaggaggccgggcttgtaatacctcctctggaacatcaccagcttctcagctttcaggtcagacatgtccagctttccgcccttctctttgacagccgggtgtttgcgcacaagcagccaacccacgtgagagaagaaaaagccacggcgggagttgtgagggtcggcgtgtgtctctgagaacttgtggtgggcgcggtgatcccggggcccattcgtacacatcgttctggaatgccatggtgttggcgatgatgagaaagagcctcaggggcagccgagccttgtaagtcctgtggctccacaggcgatgagccccggctgtgatgcccagggcgctgattacgtagtacaaatatgcaaagaggcaggtgtagaccttgcaggaggggaccagtgtgatcccgtacagggctccaatgtgc

SEQ ID NO: 12188 - protein, 1206 aa, Rattus norvegicus
  ref <308>: DATABASE ACCESSION NUMBER: SWISS-Prot / BAA20077
  ref <309>: DATABASE ENTRY DATE: 2003-02-01
MSFFNFRKIFKLGSEKKKKQYEHVKRDLNPEEFWEIIGELGDGAFGKVYKAQNKETNVLAAAKVIDTKSEEELEDYMVEIDILASCDHPNIVKLLDAFYYENNLWILIEFCAGGAVDAVMLELERPLTESQIQVVCKQTLEALNYLHDNKIIHRDLKAGNILFTLDGDIKLADFGVSAKNTRTIQRRDSFIGTPYWMAPEVVMCETSKDRPYDYKADVWSLGITLIEMAEIEPPHHELNPMRVLLKIAKSEPPTLAQPSRWSSNFKDFLKKCLEKNVDARWTTSQLLQHPFVTVDSNKPVRELIAEAKAEVTEEVEDGKEEDDDDETESALPIPANKRASSDLSIASSEEDKLSQNACILESVSERTEHNTSGDKFSNKVLSEKPTPEGPEKTVDVDGPANDVNLETVAEPNDQAVGFHENGREKKRPQLESQPDTEDQQTVDVNLVGEGNDSNIVILETNTDCLKPEEDRNEENQEIIENKLTQSEEIKDIHIQTMDLVSQETGEKEADFQAIDNEVGFTKEETQEKLGKDDKTHKVVISDITSEVGTDEPPGDTQKSAEQSQDAEGGAGEEAPEPAQTLTEKATEGPEAHGAEEEPRSGERVEDKQLEQQSAVCEGEGQVTSTSESTRATTEEPETDEVDQVSESNSIEELERLGVTGAEEQALGSKGEAATELDLEREENAQELPVKAEPQAPAASQASEPPPVLIPSINIHSENTENKGEMGALPKPETILPPEPENGKGNDTDSGTGSTVENSSSDLNLSISSFLSKTKDSGSVSLQETRRQKKTLKKTRKFIVDGVEVSVTTSKIVTDSDSKTEELRFLRRQELRELRLLQKEEQKAQQQLNGKLQQQREQIFRRFEQEMLSKKRQYDQEIENLEKQQKQTIERLEQEHTNRLRDEAKRIKGEQEKELSKFQNMLRNRKKEEQEFVQKQQQELDGALKKIIQQQKAELANIERECLNNKQQLLRAREAAIWELEERHLQEKHQLLKQQLKDQYFIQRHQLLKRHEKETEQMQRYNQRLIEELKNRQTQERARLPKIQRSEAKTRMAMFKKSLRINSTATPDQDREKIKQFAAQEEKRQKNERMAQHQKHESQMRDLQLQCEANVRELHQLQNEKCHLLVEHETQKLKELDEEHSQELKEWREKLRPRKKTLEEEFARKLQEQEVFFKMTGESECLNPSAQSRGCLQTSHPSSTRAPAWAG

SEQ ID NO: 12189 - DNA, 31737 bp, Homo sapiens
  ref <308>: DATABASE ACCESSION NUMBER: EMBL / AL138761
  ref <309>: DATABASE ENTRY DATE: 2000-07-28
gaattcctggttatttgcccaattaaaaaaaaaagctctattttgaggtataatttatgtaccacaaaattcacccatataattttgtgagttttagtaaatctgtatagttttgcagccattactacaatccagctttggaagctttctgtcacccccagaaagttctcatgtgcctattttgcagtctgtctctattcccacaccaagctcaagatagcccttacttgctttcggaatggctctgtaattttgccttttctagaattttttaataagtggaaacatacaatatgtattcttaatatgtatggctttttgcacttagcacagggtttctcagtgttggcactacagccgttttggacaggataatccttttttgtggagggctgtcctatgcactgtaggatgcatccctgaccctacccctttgtgacaacctaaaatacttccagacattgccaaatgtctcctggatggcaaaatcagcaccactggttgagtgtaatttttcaggattcatctgtgttattcatttgtctattaaaatttttggttatttatattttccttaatgatttgtaggatatgaggtcctttttccacaatgtagattgcttttcatttatttaattctttttcctgatccatagaggtatttttaaattagaaaataaatttattagaaaacaaaggttgaaaataaacagaatgaacaaactctatttttgcttgccccaaaatctcaataaaaactgttatctggccaggtgcagtgactcatgcctgtaatcccagcactttataagtttgaggcagtaggattgcttgagcccaggaattcaagaacagcctgggcaacatagcgagaccccatgtctacggaaagtagtaaaaaaacttagctgggcatgatggcactcacctgtggtcacagctgctggagaggctgaagtgggaggatcccttgaacttggtggaggctgcagtgagctgtgattgtgccactgcactccagccttggtgacagagcaagacctcgtctcaaacaacaacagcaaacaactattatctcttaaaattttaatattttttcatataagttctgcatttccttgttaaatttttgccttgatagtttatctttccagctactattttgaatgggatagttcttccattatgttttgcaattattgtttggatataagaaagctattaattactattctataatatcttaaccttattgagtgctcttattgtttattttcccctcaacattgaagtttttcaatcctataaaaatgttgatatgtaaaaaaagttgtatagagaacatacacatatcaactacctagattctacggctgttcatattttgctatactgactttattacacacgtctatccatccattcatccatttatccattcattatctgtttctctttttcattttcttaaggattttctcttctttcaagtatttgtacctttgtttttttcacttgtctaattatgttgattaatccttcctgaacaattctaaataattcgacattggaaatgttagtaatttagtgaattattttataatatattttctggcacaattttaaagttttaaactttccttcttagttttctgttttctaccagaaagttattgtttatgtgctgacatagacttctagataaagtggcatattactttattcccatgtttcttatttgtaaatctgtatttaaattcacacagatctttaacataactctgtaacagaagcagttaattcttattttgccagtgtctctatgtcaaggtacacttctgcttgaatataagatgctattgctgttactgtatgaaatgttgcctttttattataaaaatctgtcacttttatgtaccaaaatgagaactgagatggttttgaaatttcagaaaaaattttaacaaaagaactaatcgattcagtgaatatatattttttttccttaaagagcaatcattttcagaagtagtttttaagtgataatctcatctcaagataatgggaagaaaaatgtcaagaccagggcatttattttatatccctgtgtttcttactaacgtgttttttatctgtaaggatataactactgaatgtacatatggagtataaaaacaatattttattgttcttttaatttataagatgatcaacttttccaatttaccagcttatcagctcacatttcttcctataaatcaatgctgaaatattagttaatttgagtgctttctttagaaagggaaggtatttgaatcatccctccttccatcccttcctcctttcttggaaagtgtgagcaaagttaataaatttcatttctctttgtatgttgtcattttagcatctcaattttaaagaaatgtactggaaatcaagatattttattaattttaattttaatatttttttgagacagggtctcactctgtcgcccaggcaggagtgcagtgccgcgatcttggctcactgcaacctccgcttcccacgttcaagtgattctcatgcctcagcctctggagtagctgggattacaggcgcccgccaccacacccagctaatttttgtattttttagtagagatggggtttcgccttgttggccaggctggtccccaactcctgggcttaagctatccgcctgccttggcctcccaaagtgctgggattataggcgtgagccaccgtatccagccaagatattttatttttgcttgtaaagcatgttttatttccagttggtatgttgtatggcatgagctttataaagtctcttaaaattttaaagatctgtgatatggcttattcacatttaaagataaagtaatattacataatttatttcagagtatcctgccaaagttttataaagaatggccaagaaactagcataccatatctgattttggatctttaaattaaccttgatagaatcttttttctggcctgcttttttttggtctgtgccctgatggatgtgaagtaatatcgtccctgattactaatgaggttgagctcattttcatatgtttattggccatttggatttcctgttctctgaagtgattgttaaagtcttttgggctctctttctttttcttattgatttatgggggtcattatacattttggatacttatcctttgtccgttatatatgaggcacatattttcttttgcattgtggtttatcttttcactctctttaggattttctttttttgtgtagacattttaagttttaatatagtccaatttattaacttttccctacatggctaatgtttttgtcttaagaaattctttcctaaccaagatggtgaagatatcctgctgtgttatctttgtaaagttttatggtattgccttctacattaggtgtgtaattaaactggtgttgatttttgcttatagagtgaggtaaggaccgaattttattttttctatgtagatacccagttgtcccagcaccatgtactttaaagaccgtccttttcttactgctttgcaatgcttccatcatataatggatgtccgtacgcacatagtatatttccatgacattctcttaggttaaatttttaggagaattgttagagcaaaacaaatgattatttattaatgcttattttgaaattacaaaatttgtgcacatttatttttcaattttttaattgtagtaaaatacacataaaatttactgtcttgactattttttatatcctgtgaagattcaccatcgtcatgatttttaaatgtctagttcagtggtattaaatacattcgtaatgtgcaactgtcaccactgtctgtccatcatgcctcttatcttttaaaatgaaactctaccgtgttaaacagtaacttcctatttcttccttcctcctgccctaggcaactgttcttctactttttgataccatgattttgactatcctaagtacctcattaaatggaatcatacagtatttatcattttgtgacttagttcctttagcgtaatgagccttaaggttcatccatgtcatagcatatgttagaatttccttcctttttaaggctgaataatatttgtggtatgtatatacacatttttcttatccactcatctattgatgtcacttggattgcttgcatgttttagctgttgtgtatttagctacgaacgtgggtgtacaagtatctctttgagaccctgctttcagttttttagggtatatacccaggagtgggattcctggatcttgtaggaatctatttttaattttttgggggaactgccatattgttttctgtagctgtaccaattttacatttccatcgatttgtgcacaagagttctaatttctccacatctttacctatacttgttcttttcattcttttttaaagtaatagtcatcctagtgggtgtaaggtggtacttatatagttttgacttatatatctctaatattagtgacgttgagcatcttttcatgtgcttattggccatttgtatatcttcctgggagaaatacctgttcggctcctttgcctatttttgaattgggctagttgtgggttttttttgttgttgttgttgttgttgttgagttttaggagttgtctgtatattctggatattaatcctcatcagatacatgatttgtaaatattttctgtcactttataggttgccattttactgtaatattgtcttttaaaatgtataacattttacaattttcatcaagtccagttccgtgttttcttttgttgcctgtgctttagtgtcatatctcagaattcattgtcaagtccagtatcataaagcttttgcctcatgctgtcttctgagagttttatagttttaggtcttacatttaggtttttctttggtccattttgagttaatttttgtttatggtgttaggtaagggtccaacttcactgtttcacatgtggatattcagatttcccagtaccattttttgaaaagactgtccttttctcattgactggtcttggaacccttgccaaaaatcattagaccatatatatgccagtttttttttttctggtctctattccattggtttatatttcaggactgcactgttttgattactgtagcttcgtagtaagtttgaaatcaggaagtgtgagtcttcaagctttgttctttttcaagattattttggctattcagggtccattgagattccatgtgaattttgggatagggttttctattactgcaaaaaatgtcattgagattttgatagggattgcattgaatctgtagattgctttgggtagtattgacattttaacaatattaggcctccaatatatgaacatgggatgtgtttttatttatgtctttgatttcttccagcattgattttttagttttcattgtacaagtctttcatctccttggttaagttaattcccaagtgttttattctctttgatgctatcgtaaatgggattgttttccttactatttaaaagtctttatttttcttgaattaatttccagacgtggtacattttttgtcttattttaaaatatatttttgaaattgtctttttgtgttctgtttttcatcttttccaactatgcaatctatgcacatttcctcagcttctttattacacagttgtgtttgtttctgcatattcatgctgctcagagtcaataagtccttgcaataagcaggaaaactgtgtgatctgagaattggtaaaacattttggaaactgcagacttagccaaatttaacttattactgacaccattttgttgctatattttgactgaccagtgactaaattttgaatacctaaccagaacaatataaataaaatagagtttgggaatgtgaagaaaatataaggagaatataaagtatatttctttctcttttgcagatttcaggaaatgacataatccttggaatttctgtaatattttacagaaattacagaaagaatatgtacagtcgatcctcattatttgcagattttgtatttgtgaatttgcctacttgttaaagtttacttgtagtcctaaaatctatacttgcggcacttacttggttatttgtgtgtatgcgcaaagctgcaaaaaaatttgactcctctagcaagcacattcccagctaaacttgaacaaggtgacactgccttgatttcacctctcatgaagagatgaccagaggacggagacagcagagggcagtgtagtgaagtgcaagaaggtctggctgtgggggccagttggatagggtttgaatcccaagtctgacatctgtttttgggatggccttccgcaagtcacttaacacttatacacctcatttctcttttgtaaaataaagaaaggagaatctccctggatgaattgttttcaggatttaagaatataataatctatgtgaggggtgtgtgtatgtgcatggttttccctatgaacaatgtttcagtagtcgctaattcagtgcttgcagtgattttataaaacataactaccacaaataatgagaattaactctgtgtgtttgctaaatgatgatgaatgattttattcttttttaatattgatacttgttcctaccaaaatcttagcaggactgaaaagatcaccataatttgcatgtaatttaaaacagataacagtatgaacagtctaaaagtatatgcttccttcagtgcggtttcctctctcttcacttaatagctttttggaactttggatatttattacccaaacgtttactctactctgtaccttagctctcccatctgtgttgctcataggttttgaaggattatgccagttcttaatctcagttccaaatacgcccttctatgctttgtgatgctggttcaaagactgcagatcacatttctgccttgctagcagctcatttctgtttcaaaagtatagggcactagagggaggctgcaaggagaaggaggaagaaatgacttacacctttgtcttgtttcctgtgaacttcctgtctgcttgttactttgaccatcacccttgtagaggttttttttttttttgctccagcatcagcagtttctttctgtagcagctgttgaatacagtttgtagtttttccaacactcacagaactaacctcatcataacccttcataacaccagcaccagttggctggtaccctgttcctcaaaagtttgggtcgcagtctcacaggacccctcttcagagacaacagcaccagctgagcagcactctgtcctcagaggtccgtctgagtttcagctctgtggaacccttcctccaagcttctgaattttaataattccaatcttttccctttgttcccatagtcctaggggtggtagcttttgcctgtagttgttacctccctgatcctttgtattattttttcagttggcaacagagttagtcattgtttttattaaatttctctattaaaataatcaatgtgattttcctcctgtctggaccctaactgatacaaggattaaataagttactaaatggaaagtgcagagaacagtgcctcttctaatagcacgatggatattactatatacgataacatacttgaaataatttgagatttttcttactgatttctttgcaaaatactaatatttccaatttatataggtaaaaacattaaaataatcattgaattttattgatattaatatgctcaaatatcacctcggttagacctaacttaactaccctatttaagttgtaaactctggcctgtgtgctctcataccccatttcctcatcttattttatgttttttgagacagagtctcagtctgtcaaccatgctggagcgcaatggtgcaatcttggctcactgcaacctctccctcctgggttcaagtgattcttgtgcctgagcctcctgagtagctgggattacaggcgtgcaccaccacaccgtgctaatttttgtattttttggtagagacagtatttcgccatttgtccatgctggtctcgaactcttgggcccaagtgatctgcccacctcgtccttccaaagtgctgggattccaggcatgagccaccgcgctcagccttctcatctttcttattagtttactttttcccacagtactaattgctaatatactgatttatttgttgactgtccactccccaaaattgtaagtaccccagcacagagagattttgcatatttgcacattgtcagcatctagaacagtaacctaacatatagaaggcactcagtaagtatttgttggaagaatgaatggatttcagcagatcaactcttttggtcaagatttgaccaagatttttaatagatttttatgcagtagttcccccttatccgaggtttcactttccatggttttatttacctgcagtctgaaaataggtgagtacagtacagtaagatgtattgagagacatcattcacataatttttatgatagtatattgttacagttgttctattttattattattgttgttagtctcttaccgtgcctaatttataaattaaactttatcataagtatgtatgcaaggaaaaaacatagtatacatagggtttagtactatccaaggtttccagcatcctctgggggtcttgggatgtattccctggggatagaggggacggctgtattacgtttcttttctagagcacatttcgctggggtgttgtttgtctttgtgttttctgcagcttggaccagtgccttgtagtggatgttcatgaacattttgagttgttcgtgaacaatttgagttgtttagtttttacattttatggttaaatgttcttacacactggacaattaggctcttcttcttttggtggggggaagaatacctcagccttgagatgaaatcaaccagattgatagaatcagtcccagtgattattttttctttttattccttgttttttagattccttttgtatttatcttacatattttttgtttgtttgtttgtttgcctttgattgactaacacctctgtgggactgaaatcatctctgttttctgtgctggtctttcagtttccagctaaaaattttattaaaatatattcttcactatgaaatactatataatgttagaaaatgtaaaaatatagaaagaaaataaatgaagatttaaaaattattcctgtactcaccacccagggaataccttctgttcaaacaagagtaatatgagggtgtaatttttttagaatatgaaaccagtatggaactttcagacaacttatgtttcccagtatccctcatttgtttatgtaatgtggccaagctctactgatgattcatgaaaataaaaacagtgattttaggtgatcatgactgatatttgaaatctttttatcaacagaagttatatttttaaattaagattgggatttgttattccatttttgtttttaacatttgtttagttcagtagtgcccatcctctttggcaccagggactggtttcatggaagacaacttttccacagactggatgcggggatgttttggggataattcaagtgtgttatgtttattgtatactttgtttgtattattactacattgtaatatataatgaaataattacacaactcaccataatatagaattagtgggagctctgagcttgttttcctgcaactaaatgttcccatcttgggctgatgggagacagtgacagatcatcaggcgttagattctcataaggagcacacaacctagatccctcacatacgcagttcacaatagggttcacagttcacgatagagttcatgctcctctgagaagctaatgctgctgctcatctgacaggagacagagctcaggtggtattgtgagcaatggggagtggctctgaatacagatgaagctttgcttacttgcctgctgctcatctcctgctatgcggcctggttcctaacaggccgtggactggtactggtttgtggccctgtggttggggaaccccgggtttagttatttcattaagcctttatgtgaagagttttttttttttttttttttttttccctgagacagagtcttggtctgttgcccaggctggagtgcaatggcacgatctcggctcactgcaacctctatctcctgggttcaagcaattctgctgcctcaggctcccaagtagttgggattacaggcatccgccaccatgcctggttaattttgtatttttagtaggaatggggtttcaccatgttggccaggctggtcttgaactcctgaccttgtgatccgcccgccttggcctcccaaagtgctgggattacaggcatgagccaccacgcctggcctatgtgaagagtttttatgcctttagatattaggtagataagctcttttttaaaaatactttatgtcccagttatattagtgtagagaatagtgtcacacacttgtaaatatttatttcagttttgtttttttaaagttttttagaactagatcctgatgagtaatcatgttattttcaagcaataatttgaggcactattcttttaatgtaacttttattatttatattaaaccaaatgatatcattgttggtataatcaatatatgacagaatttgttactgtgaggaattttagaggttatctagtgtgagttatttttcttccttcatgccagcccattcacaagtataaaagatacatctttaaaatctccaggacatcagtcaattaattttagtggctgcgtcatttttcattgtagaactgtactgcatgatttaagcaggttcctgttaagtgacatttaggctgattcactttttcactattgcaaatggtgctttgatgagtatttttgtatgtgcatgaattttattttatgaaattatctccttctgataaattcttaaaagtgagatttagacatttatttattgaaacatttattaactttaaaaaatttagtatctgtttttaatgtaataagtggagttttgctgaagtgatgttaatatacatcatagtgaaatgtcttataaaaacaacctagttagcattttaagatctgattcctaacgttaaaaatgatcctagtatctactacatatttggaaacctttcatttataataaatgatggtgagaagttaaccaaagaaggaaaacgagaaagttaaagtactaagaacaaggaaaaatgaccaaatgatagaaatatggggagactggaaagggtatagaggaggcaaaactttgcctccaccctcttagcgtccctgctgggcccgagaattaaactgacacaagatagagtagaggagaaaagcatagacatttaatataagttttatgtgacatgggagccctcaaaagaaaatgaagtcatagagaaatggcaaaacctacatgcttttgtgttaggttgaaagaagagaggcgattgtagaaaagtagatatgttatatggggaggctaaaggaagatgtttaatttaacaaggtctgtttgtacacaattctcttgactgtgactccctatcaaagaatgtttcttttctcctgggatagagaagacgtcttttacaggaacattttcatctcctagtttcaggaagaaaaggtggaagattagaatgcccttcttgcatctgctatttttcaagtgcctttcaaactcaaagtgatccttatgtcagagtggcatgtttgaagtggtgtattctgccacccttcacgggtaatgattatgcctagtgttccattaacggaacgctaagcttgtgggggttatttatatcctactgcccaaggtaattgccaaggtctgatttttcacaaaaaaaatttgcaacctctagcataaatgggttaatttcacacacaaaaatttgcaacctccggcataaatgggtttcaacctccagcagaaagggctttggaaacagacctggatttaaattctgtttctgcttcttactagctacatgacctgggaaagccttttaacccctcaaagctcatttatatcctcctttaaagtagaggtaataatatatcatggggttgttgtgaagattaaatagtaatagtaattacagctaacatttttgaatccttctatatatgccagatagtatattaaatgtttatatgtggtttttttttttacttggcagatatatgttatcttaattctcatgaacttgtgagatgtagataatttttactgatgaggagactaaaagagggattttgtaaattgccccaagcaacacagctaataagtggcaaaaccagaatttaaatccagcagtctgacccaccagaggctgtgatttgaaatgctgtcccctatgtatatgaagcccttagcacagtgcatagccatagcatgcattaattcatatttatgtttaggctgtcttttataaatagtgtgtcaagagaatgagaagacaagccacagactgagaaaatatttgcaagacacatatttgataaaggaaagttatccagaatatgcaaataactcctaaaacttaacaattagaaaatgaacagcccagttaaaaaatggtcaaaagatttgaacagacatctcaccaaagatttgacaaataagtatatgaaaagatgctcgacatcatatgtcatcagggaattgtaaattgaaaagatacaagtactactatgtagctgttagactggtgaaacccatgcttgctggcaaccccaaatgctggtgaggatgtggagcaacaggaactcattcattgctggtgtgtatgcagactctttcagccattttggaagacagtgtggcagtttctttttttttttttttttttttggagacagagtcttgctctgtcacccagactggagtgcagtggcgcaatttcggctcactgcaagctccacctcccaggttcatgccattctcctgcctcagcctcccgagtagctgggactacaggtgcccgacaccacgcctggctaattttttgtatttttagtagagacggggtttcaccatgttagccaggatggtctcgatctcctgacttcgtgatctgcctgcctcggcctcccaaagtgctgggattacaggcgtgagccaccgcgcccggccaacaatttggcagtttcttaaaaaactaaacatactcttacgatatgatccagcagttgtactccttgtttattacccaaatgagttgaaaaacatgtctacacagaaacccgcacatacatgtttatagaagctttatccataattgccaaaacttggaaacaaccaacatatccttaagtaagtcaatggataaactgtggtataactagacaatagaatattattcagtgctaaaaagaaatgagttattaagccatgaaaacattaaggaactgtaaatacatattactaagtgaaagaagctaaacagaaaggtctatacatactctgattccaagtatatgacattccagaaaaagcaaaagcaaaactatggatgcagtaaaaagatcagtggttgccaggggttggaggaaggaggggatgagtaggcagagcacagaggatttttagggcagtgaaactattctgtatgatattataacgagggctacatgtcattatacatttgttgaaacccatagatgcaagagcaaactgtaatgtaaactttggacttgggtgataatgatgtgttaatgtaggttcatcatagcaacagatgtatcactctggtgtgcagtgttgatgggggggtggttatgcatggagcacgagggaactttctgtactttccacgcaattttgctgtgaacctaaaactttcctttatcaaatatgtgtcttgcaaatattttctcagtctgtggcttgtcttctcattctcttgacacactatttttaaaagacagcctaaacgtaaatatgaattaaatatgaattaaaacttaaaatctattaaaataataaaaaattagaaaatgatgcatttgaaatgtgacacttctgatactttcattttcaggcccagaataaagagaccagtgttttagctgctgcaaaagtgattgacactaaatctgaagaagaacttgaagattacatggtagagattgacatattagcatcttgtgatcacccaaatatagtcaagcttctagatgccttctattatgagaacaatctttgggtaagtattttctgttgatctaaaggagtagccaaaatgagttaattgtcctaaagagatgtttatgaattattaaaacctattttatgtcttatctcttctatttagttacttgtgtcacttgaatgagagttgatctgctgataagagagtaataacaaagttattctcagcttcaacagatgttcagatttatgtttcagattgtacagtttcatcatgattgtttgacattggatccaggtggaaaaatttggttaagaataataaatttcctaaaatatgaaattagatgtccttgtttataatttaaatttaatcatttaaaagttttaaaagtttctcttagaaattgtttataattttttatcctaaactttttgtaaatcttgtaataaactgtaaaatactagaaatgttaaatatttatcgtattatcaggttcaactttagtgcatgatgtgatggctaaagctgtatgtataaattttattcattttcagaaaatattaaggtacaagtagatatagaaataaaactttcatattcattataataatctgtcaatcacttgttctgtaccaacattagtttaatcaagaggactttttaaaatgcagcttcagtctttcttcctgaaggaagaagcaaagttttatgagagagaagagtaagtagtataaggaatacctgactggatgcctaaaggtctatatttttttatcccagtgctgccacttacggaacttggataagtcagttaacttttatgagtctgtttactcatctgtaggatgagtaatgatctacctcccaaattattttctgaataatgtaatgaatttgaaaacaatttctaattggcaagcacttgtaaaaaaaaataaagcattatgctgagggaaaaaaggcaggaagctacctaattagttaaaaatatgttattttttaaaattatagttattattaatgtggtgttttctgaaattattgttcagggctgtcgcagaatgtttccaaagattataatgcaaatgaacccatagactagttaataaacagataagacctttacttgggactattgcacaataaaaatttagacaactgtgaggggaagtttagtgggagacataaatgttaattaatcaaataatcacaataaatataaaattacaactgtggtaagggttaagaaggaaaggtacatggtgttatgtcttaccagggaagtcaagataagcacctatcagcaggtaataattgagctcggatctgaagcttttgtgggtatttcttctgttttttttttttttttttctaaaagaagtctctgtataaatattttcaggatttattcctatttaatacagtttaaaaaaacaaatgtatatttgttcacttaaagcacaagttgccttaaaaatataagtaataaaatctttcattggtgaccaaatagctgtgcagtacaataccaaatgaaaaagttctgtacctggtagttgtagagaagcagggacagtaaacatggcaattaacaaaaatgcccatgctttcacagtgggctttatcaaatgcatattgtttgagatttgtaactcttttgacaaaatcttcgtttagtatatcgtttccataaccagattatttgatagctatttctttatcttttttgctaagctgaagaaaaaatactgaaactcaaaactccatgtagttttagacacacgcttttttttttttttttgcatgcagatcctcattgaattttgtgcaggtggagcagtagatgctgtgatgcttggtaaatacctttttgttctttctgttcatatcttaaattatacttgataagatgaaagaatttcaaccatatataaatatattcaaatatgtaagtatcgagtaaagttcagtaagttaactcaagtatgtttttatattcttggataattatagtaaaattctaaaatgaaatgttgagtgtgtcaagaatgtgatctttgtagatatagttcttttaaaataaattccctgcatatgatctttgacagtgatgatatatacagaaaggtatatagcctgctaatatgttttcactgtataaaaagcagatttttttttttactttctccttatagaacttgagagaccattaactgagtcccaaatacaagtagtttgcaagcagactttagatgcattgaactacttacatgataataagatcatccacagagatctgaaggctggcaacattctctttaccttagatggagatatcaaattgggtaagttattcacttaaataaaacattagaatttttactctgaaatttccatctttatgtatgtgacttaatgtggttttattactacttaaatatgtgaaacatggagaactaactccatgctggtttttaaaaaacacttttttaggtaaatactcatttttctataatttctaaatatcagcacctaattgaatgctttaaaaagaagataagaaagaatgaatttttattttcaaaaaggcatgctttttaaagaccaatttcaagtttgtacccttaaatttttgtacgtagacttaatacttgtaaatgttttatgtttagaatataatatagtatgtaaaactgctaactcagttttttctttatttccaaagttcatgtctagtgagtttttccccatgtttagttttatattctattttattgatatggtacgttgactaaactaacaaagtaatcttagttctgaagagaatacctaaacgtaaggactagaatttttaattttactctttatactgagggaagaaatgttaccttcataagaagaattagatgtaggtcttatgaaagttatagcgctctttacccaagataggaattatttaaaaagtctagagatgaagtccaaatttgtatattttggaaggctattcaaaggacaaaatatattcagaagtcaagttgataccagtgactatagtcatttcactttactttgtcaagacatttaaacagatggtgtactaaattttattctttttaatttttttttaacggagtcttgctctgttgcttaggctggagtgcagtgatgtgatcatagtttactgcagccttgaacccctgggctccagggatccttccaccttatcctccctagtagctggaactgcaggcatgcaccaccacgcctggcgaatttttaaaaatttttttgtagagatgaggtcttgctctgttgaccagactggtcttgaattcctgggtgcaagtgattcttctgccttgggcctcctgaagtgaattttaaccttttgattgtgaaaaattacagatatagaaaaccacaccagaaattgtgtagcttaagtttagtactttgtagacatagctttgtaatcactacctagatcaaaaagtagaactttgacaggcatcccagaagctcttccgtatgcccatctcagccactgcccttctcttctccacattttatcctgacttttatattatttccttccttgtgtttctttatggcttagtcacccagtattcatctctagatgttagggtttaaacttgctcatataaaacttgggtttttaaagtctcttaacttacaggccttcccccattcctttcttttctttatattatggcatgtgtaatgggggatgagggcaatatcacccacatgggtgcaaaaattagttctttagggccaaaaaaaaaccttatgcattacaatggtttgtgaccttccaaaggccccagtacatgaagagatataacactgtatctatggcattaaaattttatgggaggagggatgatgtgaaaaaaatgtttaaaatgactccttagaggggctagtaatgaaacactgatccatggaacctgggctgtttggcctgttgtgtttccctcaaactgcattttgctattgcatactcctgatgattgaagttcctttctgtatttccttcagtttggcagatgaatccaaaggcttgatcagtctcaagcctgatcctttggcaagacttacaggtggttttgcattctttcattgggaggcacaccgtgtctgctttgtgcccttttttgatgttgcatctattgaggcttaatgcctacacctctgtcttttggggttgcaaaacgaattccattattttgttttcattattttcgataatgattttgatataaacaccaattatttcattattttcattcattataaaattagtaatgaagataatgacttggctgtctcttatcctcaattgatgaccagtgttttaaaaaatattgttagttcatggatttaattttatttggttggtttcaaatccattgcagtttttattcttattgaagctcatgttgttccatctttagtcagtggggtcttcctcgtgtctgcttgttggtcttcttgacagcactagtaatctttgatagcttacttgacagttctgagatgtttcaggctcatctgtgtatttcctgtgtcagacctgtaattaaccatttcttttttcttttctttcttttcttttttttttttttttttttttgagtcaaagtcttgctctgttgcccaggttggagtgcagtggctgatctcagctcactgcaacccccacctcctgggttcaagggattcttgtgcctcagcctcctgagtagctaggattacaggcatgtaccaccatgcccagctaatttttgttttttagtagagatggggtttcaccatgttgaccgggctggtctggaactcctggccagaagtgatctgcccacttcagcctcccaaagtgctggaattacaggtgtgagccactgcacccagtgtaattagccatttctttaagaagccctggtttcttttagtagaatatagtatttcaagaccacagtctggtgtaagagatgcttgcagttttctatattggccattgttctaggacttttcaaaggacagagctagaaccctcatgagttcatatatatttcctattcaaattcaggataaaggtttttaaaatctaacctctgtaataaatgtgcatctcctttcttctatgttgagagttctggttctcaaggacattgataggtttaggatacctcataattcattttaaccctcatttctatatttaatgctcaccaccactccttatgttgatgtgtctttggtgatgttggttatctgaagctcagcttttggtagattcctctgaaagggctctctgaattcttacatagtgataacagttgtacccttatagttgaaggttagttttgctggataacaaatccttggcacaaatttctttccttcagcatctgaaatatgttactctgttttcttcagtcatgaagtgttgttgttgaaaagtctgataatctgaatttcttcattgtaagtcatgtgctctttttgcttagatgctaaaagtttttttttttttttaagaccagtagtttgaccagtcttttctaataaatattttttttcttttcttttttttttttttttgagacggagtcttgctctttcacccaggccggactgcagtggcgctatctcggctcactgcaagctctgcctcccgggttcacgccattctcctgcctcagcctcccgagtagctgggactacaggcgcccgtcaccacgcccagctaattttttgtatttttcgtagagacggggtttcaccgtgttagccaagatggtcttgatctcctgacctcgtgatccacccgcctcagcctcccaaagtgctgggattggtgtgagccaccgtgcccggccttctaataaatattatgctcgtacaatattcgagtgctttcttccccgcccccgacaggaaagttttctggagttatagatctgagcatttgtttgttcccttgcattgacttgcttctttagagacttttagtatttgtttgttggatctttgcctgttgtccatgtttgtaactttttctcaagtccttttttagcttgctttcttttttatcgtaggaaaatatatacaacataaaatttacctttttgatcatttttaagtgtacatttctgtggtattaagtacattcccattattatacaaccattaccatcacctatctccatacctcttttcatcttgcagcagttaaagtctatacccattaaacagttagtccccattttccactcctcccagcttctggcaaccaccattctgctttcagtttctatgattttgaccactctaggtatatacgtatgtggaatcatacaacatttgtccttttgtgactggcgtattttacttaccataacgttctcaaggttcatccacgttgtagcgtatttcaagtcttccccttttaagattgaataatatgccattgtatgtatataacacattttgtttatccgttcatccatcagtgggcacttgggttgctttcactttttggctattgtgaataatactgctatgaatgttggtgtacaaatgtctgtcctactccctgcttttaattcttttgagtatgcacccagaagtggaattgctgaatcatatggtaattctatgtttaatttttttgagggaccaccatgctgttctccatagcaactgcaccattttacatttctaacggaaatgtacaaggcttccagtttctccgcatgcttgtcaacactttttttttttctatgctacatccatcctactgggtgtgaagcggtaatgggtatgaatttgttgtattatttgctcttgctttccctagtttagcctttgtttctaaagtttttcttttttattttaaattttttctggagctctgtcgcctttcagaatttttctaattctgacttacatggctcttttatgtttttcatcatttttaaaagtgtcctagcttattttgaaataggatgttacagttttgatcaattttgggggcattttttttgtaaatatattgaaattttatttgaatatagggacatacttgtgtaaaataatgtgtaccttatcaatatactgaaggtttaggaattgtaaaataatatttagttagttgacaattaaaatatttgtaatttctgtttaatttacaaatacttccagagaaccttccatttctgcaacacagatatatagaacaatcttatccccaagaaccatataatagataaaagtaattcaggcagaattgcatgacctttaagagttctacaacaaaaacaacaaaggttagaattgtgaatatggctaataatagctaccatttattgagtgtatactctgtggtaggcatgagcatcaaatactgaatttttggtacttattcaactttgagaattgtcgcatcaaatgtgaaacttaaaaattcgtgcatttatagcatgaggtgaattatgcagcaatagcagttttatgttgctgttaatgttgtgtgaactccaggctgaaaaggtgggattaacaactgaaaaagctataatgttactgttctgtataatttaaatcagaaaacataaggttcccaattttttcttgacaatataattttatgaggaatttagcaagacatacactgtcctaaaggttgctttagtataatttctatttttcacactatagaaaaaatgttaatgactcttagtttaattgtgccacatagcactagttggcatttattttgaagtggatagactggtctgcttttagagttaccattttttattttcaattttggaggatttgtcatctgaagataaggtggtattaaatgtattgataatgggatctttagcaggtttttttgggagatggtagaaagagatggtcaagattaagatgggagagacatctttttctttctgtttaacttactttttataataagattagccttattaaagacttaaaatgctttttctccccattgaatacaatgaacaatgcttaaaagttctcattaatgcttttgtgtgattatttcaagcggattttggagtatcagctaaaaacacgaggacaattcaaagaagagattcctttattggtacaccatattggtatgtattcagttttatgaatttatagtattagtcatgtcagcagttataattactcatgaatttttgtccacataattgattataccatgtgttttgcaatcactgttcttaaacatgttaacttttaattatctgtcttcataggatggctcctgaagtagtcatgtgtgaaacatctaaggacagaccctatgactacaaagctgatgtttggtccctgggtatcactttaatagaaatggctgagatagaaccacctcatcatgaattaaatccaatgcgagtgctgctaaaaatagcaaaatctgagccacctacattagcacagccatccagatggtaaaaatattcttaaaaaagcttaataagaaacaaatgatactaggaagcagaacttgatgttatattctcacaattttccaagagtatttaaaattggatacatggttcgaagactatatgaattagaaaagtgatttttggtatatttctcttaaagaccattaaaactcttcgagctcacttttcccatatatctgaaaatatgaatgatttgagttttgcatgagaaaggtattttctgtactatgaggaagtgaggtatatagattgatctatatttgtgaaatttattagaaattttgtgctttttggcatacttgtgagtatatggctgtctcagtgattatgtacctacttacatatatgtctaacatgtatttacagatgaataagttttacaaaatcttaatagtctcattaactagttatttaaatgttgaattaatactattacatacataatgaaacttaagcataacttatcaaagagttttgtttaatttgattaacaagaaagtaaaatagaatgttgttaaaatttattttaaaggtcttcaaattttaaggactttctaaagaaatgcttagaaaagaatgtggatgccaggtggactacatctcagctgctgcaggtaagagagtatgacaacagcaaataatataattattttaacatctaagaatgtaatttcatattcagtgtgctttctttccacttaaatttccctgtggagagtcaaaatggcagtagttaacatttgctttacaaaataaatgctgctgttaccatcaggcatttagcttaaacgttattcctcctgtgcttttttgattcagtttaattatgttcttttcattttggtagttatttccattatgtctctccagttactagaaagcaagctccttggggacaggggccgtgaactaattaattaaaaaatgtcttacagtgagggtaaatagtaaatattgttgacttaaaaaaatgttgttaaagcgattgggtaaatttaattttgctttatagaaggactacttgtaatatattaattaaaaattgtcaattttataggtgggcaaataaaatgacaaatcttgaggcaattactgttaggttattatgtaactccatcatagtgttttaggttgacctatttatctgggggaataaagcaggaaaaaattgctttgttgtgtgcagcaagtatacccctggaacacactttctattattattttgttacccccacacttgaagcccttagtctgcgacagacactgttaaatgttgagtatacaaagatgagtaaaatggcttctcattctcaagaattttagaaccatgtcaaaaatacaggtgtttatagatacttctaacagaattctaaagctttttataattttgaggctttgatagggtttatagagatggttactttttaagaagtaataatgaggccaggtgtagtggctcatgcctgtaatcccagcactttgggaggccgaggcgggtggatcacctgaggtcaggagttccagaccagcctggccaatatagtgaaaccctgtctctactaaaaatacaaaaaatcagccgggcatggtggcacatgcctgtaatcttagctactcgggaggctgaggcaggagaatctcttgaacctgggagatggagattgcagtaagttgaaatcgtgccactgccttctagcctgagtgatagagtgagactccgtctcaaaaaaaaaaaaaaaaaaaaaaaaaaaagtaataatgtagtgacctgacatttgctttaaatttcaattaaaattttttattacgaagttttcaaacacacagaaagtacatgtacctactacccagatataacaattcttatcatttttgataaatttgcttcagattcttaaaaatgtacagatccagttgcaggtagtccctgcttttgctcaagccctctcccctctttctttctcagatgtagcattatctgaagttttctgtcattttcctgcccacatgttcatattttttaccacataagaatgtgtgttgtgtgtgtttgaaacttagtttagtagtattccagttgttgagtatgttctttttaatgatcaacagcatccctttgttactgttgattccaacaaacccatccgagaattgattgcagaggcgaaggctgaagtaacagaagaagttgaagatggcaaagaggaagatgaagaggaggaaacagaaaattctctggtcagtatttaggaaagaaatttcatttagtgaatagagttcggttttgaggtgtagttgctcctgtatctaaggattgatgggtggcaacgcaaaacctttaaatttagacctgaagattagtagcaaggttgctcgtcgctgcacatttttgttatatttcccttttttttgagatggagtctcactctgtcacccaggttggagtgcagtggtcactacaacctctgcctcccggtgtcaggtggttcttgggcctcagcctcccgagtagctgggactacaggcatgcgccaccacacccaactaatttttgtatttttagtagagatggggtttcaccatgttggccaggctagtctcgaactcctgacctcaagtgatcttccctcctcggtctcccaaagtgctgggattacaggtgtgtgccaccgcacccggcccatttttgttatatttcttgtgagaagaattgttaattctttaaattcagcaacatttactgaataaagatctgaaatcactgtaggtctgtaaacattgttttggtcactctaaggtcatgttttaacactaaaaatacattaaatcttttttagccaatacctgcaagtaagcgtgcatcttctgaccttagtatcgccagctctgaagaagataaactttcacaaaatgcttgtattttggagtctgtctcagaaaaaacagaacgtagtaactctgaagataaactcaacagcaaaattcttaatgaaaaacccaccactgatgaacctgaaaaggctgtggaggatattaatgaacatattaccgatgctcagttagaagcaatgactgaactccatgacagaacagcagtaatcaaggagaatgaaagagagaagaggcccaagcttgaaaatctgcctgacacagaagaccaagaaactgtggacattaattcagtcagtgaaggaaaagagaataatataatgataaccttagaaacaaatattgaacataatctaaaatctgaggaagaaaaggatcaggaaaagcaacagatgtttgaaaataagcttataaaatctgaagaaattaaagatactattttgcaaacagtagatttagtttctcaagagactggagaaaaagaggcaaatattcaggcagttgatagtgaagttgggcttacaaaggaagacacccaagagaaattgggggaagacgacaaaactcaaaaagatgtgatcagcaatacaagtgatgtgataggaacatgtgaggcagcagatgtggctcagaaagtggatgaagacagtgctgaggatacgcagagtaatgatgggaaagaagtggtcgaagtaggccagaaattaattaataagcccatggtgggtcctgaggctggtggtactaaggaagttcctattaaagaaatagttgaaatgaatgaaatagaagaaggtaaaaataaggaacaagcaataaacagttcagagaacataatggacatcaatgaggaaccaggaacaactgaaggtgaagaaatcactgagtcaagtagcactgaagaaatggaggtcagaagtgtggtggctgatactgaccaaaaggctttaggaagtgaagttcaggatgcttctaaagtcactactcagatagataaagagaaaaaagaaattccagtgtcaattaaaaaagagcctgaagttactgtagtttcacagcccactgaacctcagcctgttctaatacccagtattaatatcaactctgacagtggagaaaataaagaagaaataggttctttatcaaaaactgaaactattctgccaccagaatctgagaatccaaaggaaaatgataatgattcaggcactggttccactgctgatactagcagtattgacttgaatttatccatctctagctttctaagtaaaactaaagacagtggatcgatatctttacaagtaagtgtacatgagtcattgtttgggttttcctttgccattttctcaattcagagtttatgtgaaattgatgtcttgaaaataaaacagcattaaattaatgtagtattaacaatataaattcttacagcctatgaaagcaattaaaaagaactaaggagattgtggatctaatctttaaattttgtggtaggatctacctatttttgcagacctgatgcagataaacagtgtaatatggttgcttggtgtgattaggttcctttattggacatatctagatgcaacattagcaagaatcaacaatgtatgagagaattagaaattgaaagaatgatgtctttttaagcacatttagggtgtaaacaatccttgatttaccattggcccatacagtcacagacattgctactgccatgagaaccattgtggggaaaacaaaacaaacactaaagcccagaacacttggagctttgagtgtaattctcaaattttagtgtgcttaggagttactagcggctatgtagaagtctggagtgggtcccaaggatcactatttgtaaaaaaaaaagatcccacagagttctgatgcaggtgatccatgggctgccccttggaaaatacttcctagaccctctgggttgatagtagcagaagagaagacagaaaagcaggaacaacctaagaaaactgacatagatggatctctagggcatgagtgattagtctgcctatctgccccaaattcctaggattttcttacatgtattcctaggattttcttcttttttcagtttactttctttcactgactgaaataaccaccactctgaaattcattcactgacttaatagcctcttttaaaaatgcaaataacttgtataagaatgaagaagatattaattattgaacttttagtaggagctgaagaaatgtgaagtttggaggttaaggtgtagataggtgtattttttggagtctgccaactttagattttagaggaatcctgggtagggtaccatagtcctggactttggaagaagagcatgaggatcctggaagcttggagaagagaacagtaagaggagaggatgcagaaaggtgattggaaggtgccaaagagaaactgtttaaaatttggatgcattttgagtttagcattttcacattccatttttgcttcctctgccttctaaccctttcttccatatcaacacccagtaagtatctgccctgaacacttagtttaccaaaatgtatttgtaggagtcttatatgtctgttatttctgtttgcatttaaatgtttttggataccagttgaggaatgaagagtttagtcttaataaagaattttaggtcatagctagcagccaaatctggtacttttgggtgcagcagaggcactgtctttctagtaaccctaaaatcatacatatatctctggccctgagatggagggaggggctgtcgatattattgttactgattaagtagattttgatccccagtgctggcagtgtttaaaaattacctgagagctttttcaaaaaaaagagatttccagctaccctcagacctgtcaatttagtttttttttaagagatgagccccacaaattcatttttaattgttttgtcagtgaaaaagcagaggtatctgagaaactacaaattgaaaagatgaaaaaaaaggataacatgtaaagttctactgattagctatgtgaactgctcatcacttatgcctaattataatgtgtcataaaagctatacatgaagatgatcaaaatgcatactttgaaaaaatttgatttcatctgtaaagacgtgtaagtcagatgacgtttaaggtgttataactggttccacagatgagtctattgctttatatttatactttctatgtgtagtctgcatggctgttcagttgttttgttttaaaaaagaaagaaatgtttaaggaagaagaaaatgttttctacctccagtattccttgtacaaagcctaactaaaataaaatctcactcaggaaacaagaagacaaaagaaaacattgaagaaaacacgcaaatttattgttgatggtgtagaagtgagtgtaacaacatcaaagatagttacagatagtgattccaaaactgaagaattgcggtttcttaggtgagtagagaaacaacgtaattaaaactggtttgtgacttcttttcagtctctgaaaagtcagaagaatagagaaacaagggtaaattattggctaatttttttttattcttttactaccgttccactcgaaagaaaatttttaaagctttaaaaaaaaacgtatttcagaagtgtaatttttgctgtcttctctatcattaccattaaattttatcagacgtcaggaacttcgggaattaagatttcttcagaaagaagagcaaagagcccaacaacagctcaatagcaaactacagcaacaacgagaacaaattttccggcgctttgagcaggaaatgatggtaaagtctgattgttataccattttatatcattttgtgttaataatgacatttactgcattaaaaacagacaaacaaaaaaggttgtagaacttgttctctgattgccagatttctctagctttgtgatttatttctggcatttttacccttttggtgttctggatgccttttattgatttattcttttttcttgaaaggattttctatcccagtctaccttaagctggtttatggtgtgatgggttgttttttctctcatgaaaacttatgaagccagtaaacaaagttcctagatttgcctattgctgggtaatttttcagtgctctaattcgatctttcagatttggaatccaagattttaagccagtttagagcaattgccttcaaacctagctgagcagtaggactcctcaggggctttttaaaaatgtgctttattctctggcttctacagttaagcctccacatctctatttcctgctgctagaggaaatagtgctgactagtcctgggtagctgtcactgagtccttcagtttttgccttgtgtccaaagttggaaaaggaattagtaatgtaatataaaatttttgtaatttatgttgactatctgccttaatgtaggttagaaaaagtatcatttgaaatgttacagtactcatgttttgaatatagtccttgtgttgacttgtaattttaattgataaagattgttttgtgtgaactgtggattgttgattacatgagttggatcataactgagatttcctaagaaaatagtgaacttttgttctcattgagtatttttatagtacttatattgttttccaaaaccttataaaatctgtatttctcccccatcatactttctaaaatgttttacttttcaatttttttaaaaagaaaacatccattacaaataagtaactatacctgtattcaaaaacagtgttactgagtgttatataaacaggagtcttgttgcaagagtagatttataattccaaaagatctgttccaatagaataaggtgtttattttaagaatcttaatgtggaagattgaatctgaaaatgacaatcttattattaaataatggcgatattattaataatattattttattaaagtagacctcaaataagctctttgatttatcaaaaattttattggataaatattgaaatttttctgatttgccttactacttcacaacaattagctattcttctggataatctaaaaactttgaacattctactagtataatagaaaacaaattttgggtcgggcgcagtgccttattcctgtaatcctagcactttgggaggctgaagtgggcagatcacttgagggcaggagttcgagaccaacctggcaaacatggtaaaaccccgtctctactaaaaatacagaaaaattagctaggcaggatgtcacatgcctgtaattccagctactcaggcggctgaggcatgagaatcatttgaatctgggaggcggaggttgtagtgagcagagattgtgccactgcactccagcctgggcgacagagggagatcctgtctcaaaaagaaaaaacaaacaaaaacagaaaagaaaaaaaaaaagaccaggcccagtggttcatgcctgtaataccagtattttgggaggccgaagcaggaggattgcttgagcgcagaagtttaagaccagcctaggcaacatagtgatagccctatctctccaaataaataaataaataaataaataaataaaaagataagttggtcatggtggcatgcactgtagtcccagctacttgggaggctgaagcaggaggatagtttgagcccaggaggccgaggctgcagtgaactgtgattgtgcaactgcactccagcctgggtgacagagtgagaccctgtctctaataaataaaatagaaaaaaaatttccatgttagaaaaaaagaactcatttttttgagaattttcataacatattttagtgcatttgactttttcagtattgtgaaggttatagtacattactaaatttaaatactagttatgttctcttaggaaacatctttactataaggtattaatatgggtgatggaaaagttatcatcttgagctatattgttttacagagtaaaaagcgacaatatgaccaggaaattgagaatctagaaaaacagcagaaacagactatcgaacgcctggaacaagagcacacaaatcgcttgcgagatgaagccaaacgcatcaaagg

SEQ ID NO: 12190 - protein, 1235 aa, Homo sapiens
  ref <308>: DATABASE ACCESSION NUMBER: SWISS-Prot / CAC00587
  ref <309>: DATABASE ENTRY DATE: 2003-02-01
MSFFNFRKIFKLGSEKKKKQYEHVKRDLNPEDFWEIIGELGDGAFGKVYKAQNKETSVLAAAKVIDTKSEEELEDYMVEIDILASCDHPNIVKLLDAFYYENNLWILIEFCAGGAVDAVMLELERPLTESQIQVVCKQTLDALNYLHDNKIIHRDLKAGNILFTLDGDIKLADFGVSAKNTRTIQRRDSFIGTPYWMAPEVVMCETSKDRPYDYKADVWSLGITLIEMAEIEPPHHELNPMRVLLKIAKSEPPTLAQPSRWSSNFKDFLKKCLEKNVDARWTTSQLLQHPFVTVDSNKPIRELIAEAKAEVTEEVEDGKEEDEEEETENSLPIPASKRASSDLSIASSEEDKLSQNACILESVSEKTERSNSEDKLNSKILNEKPTTDEPEKAVEDINEHITDAQLEAMTELHDRTAVIKENEREKRPKLENLPDTEDQETVDINSVSEGKENNIMITLETNIEHNLKSEEEKDQEKQQMFENKLIKSEEIKDTILQTVDLVSQETGEKEANIQAVDSEVGLTKEDTQEKLGEDDKTQKDVISNTSDVIGTCEAADVAQKVDEDSAEDTQSNDGKEVVEVGQKLINKPMVGPEAGGTKEVPIKEIVEMNEIEEGKNKEQAINSSENIMDINEEPGTTEGEEITESSSTEEMEVRSVVADTDQKALGSEVQDASKVTTQIDKEKKEIPVSIKKEPEVTVVSQPTEPQPVLIPSININSDSGENKEEIGSLSKTETILPPESENPKENDNDSGTGSTADTSSIDLNLSISSFLSKTKDSGSISLQETRRQKKTLKKTRKFIVDGVEVSVTTSKIVTDSDSKTEELRFLRRQELRELRFLQKEEQRAQQQLNSKLQQQREQIFRRFEQEMMSKKRQYDQEIENLEKQQKQTIERLEQEHTNRLRDEAKRIKGEQEKELSKFQNMLKNRKKEVINEVEKAPKELRKELMKRRKEELAQSQHAQEQEFVQKQQQELDGSLKKIIQQQKAELANIERECLNNKQQLMRAREAAIWELEERHLQEKHQLLKQQLKDQYFMQRHQLLKRHEKETEQMQRYNQRLIEELKNRQTQERARLPKIQRSEAKTRMAMFKKSLRINSTATPDQDRDKIKQFAAQEEKRQKNERMAQHQKHENQMRDLQLQCEANVRELHQLQNEKCHLLVEHETQKLKELDEEHSQELKEWREKLRPRKKTLEEEFARKLQEQEVFFKMTGESECLNPSTQSRISKFYPIPSLHSTGS

SEQ ID NO: 12191 - DNA, 3891 bp, Rattus norvegicus; identical to SEQ ID NO: 155
  ref <308>: DATABASE ACCESSION NUMBER: EMBL / AB009463
  ref <309>: DATABASE ENTRY DATE: 1998-08-13

SEQ ID NO: 12192 - protein, 770 aa, Rattus norvegicus; identical to SEQ ID NO: 156
  ref <308>: DATABASE ACCESSION NUMBER: SWISS-Prot / BAA32331
  ref <309>: DATABASE ENTRY DATE: 2003-02-01

SEQ ID NO: 12193 - DNA, 2601 bp, Homo sapiens
  ref <308>: DATABASE ACCESSION NUMBER: EMBL / AB009462
  ref <309>: DATABASE ENTRY DATE: 1998-08-13
tacgggcctgcaccgccaccgcacaaagacgcctcgggagccgccgcctgcacccgggccgcagcagccacgccagccggagcccgagccgtagcccgagcccgagcccgagccgcagccagagccagagccggagccgcagccagagccagagccggagccgcagccggaaccggagccggagccgcggggcaggaggcggcgcccgcgggcggccgggcccggcatggagaagcgcgcggccgcggggctggagggcgcgccgggcgcccgggcgcagctggccgtcgtctgtctggtgaacatctttctcaccgggagactcagcagtgcggttcctgccttagcggcctgcagtgggaagctggagcagcacacagagcggcgtggggtcatctacagcccggcctggcccctcaactacccgccaggcaccaactgcagctggtacatccagggcgaccgtggtgacatgattaccatcagcttccgcaactttgacgtggaggagtcccaccagtgctccctggactggctcctgctgggcccagcagccccaccccgccaggaggccttccgcctctgtggctccgccatcccacctgccttcatctctgcccgcgaccatgtctggattttcttccactcagacgcctccagctccggccaggcccagggcttccgtctgtcttacatccgagggaagctgggccaggcatcctgccaggcagatgagttccgctgtgacaacggcaagtgcctgcccggcccgtggcagtgcaacacggtggacgagtgtggagacggctctgatgagggcaactgctcggcgcccgcctccgagcctccaggcagcctgtgccccggggggaccttcccatgcagcggggcgcgctccacgcgttgcctgcctgtggagcggcgctgtgacggcttgcaggactgcggcgacggctcggatgaggcgggctgccccgacctggcgtgcggccggcggctgggcagcttctacggctcctttgcctccccagacctgttcggcgccgctcgcgggccctcagaccttcactgcacgtggctggtggacacacaggactcccggcgggtgctgctgcagctggaactgcggctgggctatgacgactacgtgcaggtatacgagggcctgggtgagcgcggggaccgcctgctgcagacgctgtcctaccgcagcaaccaccggcccgtgagcctggaggccgcccagggccgcctcactgtggcctaccacgcgcgcgcccgcagcgccggccacggcttcaatgccacctaccaggtgaagggctattgcctcccctgggagcagccgtgcgggagcagtagtgacagtgacgggggcagcctgggcgaccagggctgcttctcagagccacagcgctgtgatggctggtggcattgtgccagcggccgagacgagcagggctgccctgcctgcccgcccgaccagtacccctgcgagggtggcagtggtctgtgctacacgcctgccgaccgctgcaacaaccagaaaagctgtcccgacggcgccgacgagaagaactgcttctcctgccagcccggcaccttccactgcggtaccaacctgtgcatcttcgagacgtggcgctgtgacggccaggaagactgccaggacggcagcgatgagcatgggtgcctggccgccgtgccccgcaaggtcatcacggcggcgctcattggcagcctggtgtgtggcctgctgctggtcatcgcgctgggctgcgccttcaagctctactcactgcgcacgcaggaatacagggccttcgagacccagatgacgcgcctggaggctgagtttgtgcggcgggaggcacccccatcctatggtcagctcatcgcccagggcctcattccacccgtggaggactttcctgtctacagtgcgtcccaggcctctgtgctgcagaatcttcgcacagccatgcggagacagatgcgtcggcacgcctcccgccgggggccctcccgccgccgcctcggccgcctctggaaccggctctttcaccggccgcgggcgccccgaggccagatcccactgctgaccgcagcacgcccctcacagaccgtgctgggcgatggcttcctccagcctgctccaggggctgcccccgaccccccagcaccgctcatggacacaggcagcaccagggcggccggagacaggccccccagtgcccccggccgtgcaccggaggtgggaccttcagggccacccttgccctcgggcctgcgagacccagagtgcaggcccgtggacaaggacagaaaggtctgcagggagccactggcagacggcccagctcctgcagatgcacctcgggagccctgctcagcccaggacccgcacccccaggtctccactgccagcagcaccctgggcccccactcgccagagccactgggggtctgcaggaaccccccgcccccctgctccccaatgctggaggccagcgatgatgaggccctgttggtctgttgaccgctgggctcgctggtgaccgccacagccccgctttgtaaccagggaatacacagtcattt

SEQ ID NO: 12194 - protein, 770 aa, Homo sapiens; identical to SEQ ID NO: 158
  ref <308>: DATABASE ACCESSION NUMBER: SWISS-Prot / BAA32330
  ref <309>: DATABASE ENTRY DATE: 2003-02-01

SEQ ID NO: 12195 - DNA, 3891 bp, Rattus norvegicus; identical to SEQ ID NO: 155
  ref <308>: DATABASE ACCESSION NUMBER: EMBL / AB009463
  ref <309>: DATABASE ENTRY DATE: 1998-08-13

SEQ ID NO: 12196 - protein, 770 aa, Rattus norvegicus; identical to SEQ ID NO: 156
  ref <308>: DATABASE ACCESSION NUMBER: SWISS-Prot / BAA32331
  ref <309>: DATABASE ENTRY DATE: 2003-02-01

SEQ ID NO: 12197 - DNA, 2601 bp, Homo sapiens; identical to SEQ ID NO: 12193
  ref <308>: DATABASE ACCESSION NUMBER: EMBL / AB009462
  ref <309>: DATABASE ENTRY DATE: 1998-08-13

SEQ ID NO: 12198 - protein, 770 aa, Homo sapiens; identical to SEQ ID NO: 158
  ref <308>: DATABASE ACCESSION NUMBER: SWISS-Prot / BAA32330
  ref <309>: DATABASE ENTRY DATE: 2003-02-01

SEQ ID NO: 12199 - DNA, 1902 bp, Rattus norvegicus
  ref <308>: DATABASE ACCESSION NUMBER: EMBL / AB010635
  ref <309>: DATABASE ENTRY DATE: 2000-02-01
tagcccgacgaactgagaactggccatggcacggaaacaaccacatagctggctgaatgctgtgctctttgggctcctgcttattcttatccatgtgtggggtcaggactcaccagagtccagctccatcaggaccacacacacgggccaggtccgaggaaagcttgaccacgtgagggacactaaagctggtgtccacaccttcctgggaattccctttgccaaggctcctgtaggaccgctgcgctttgcacctcctgaggaccctgagccatggagtggtgtgagagatgggacctcacatccggccatgtgtctgcaaaatattgatatgctggatgaagtaggcctgacagatatgaaaatgatactgtcttccattcctatgtctgaggactgcctgtatctcaacatctatacaccagcccatgcccatgagggctctaacctgcctgtgatggtgtgcatccacggaggtgcactggttataggaatggcttccatgtgtgatggatctctattggcagtcaatgaggacttggtggttgtcgctatccagtatcgtctgggtgtcctgggctttttcagcactggagatgagcatgccagaggcaactggggatacctggaccaagtggctgccctgcgatgggtccagcagaatatcgcccattttggaggcaaccctaaccgggtcactatttttggcgtgtctgcaggtggcacaagtgtgtcttcacatgttatatcccccatgtctcaagggctcttccatggtgccatcatggagagtggagtggccctgctgcctgaccttatctctgaaacctctgagacggtctccactacagtggccaagctctctggatgtgaggccacggactcagagaccctggtgcgctgcctgagagccaagagtggagcagagattctggtcattaacaaggtcttcaagatgattcccgctgtggtggatggagagttcctacccaggcatcccaaagagctgttggcatctgaggattttcgccctgtccccagcatcattggtgttaacactgatgagtactgttgcaccattcctatggtcatgggcactgctcaaataataaaggagctatccagagagaacctgcaggctgttctaaaggatacagcagcacaaatgatgcttcctcctgagtgtggtgacctgctaatggaagagtacatggggaatactgatgatccccagaccctacaaatacagtacgctgagatgatgggagacttcctgtttgtgatccctgcactccaagttgcacactttcaacgttcccatgcccctgtctacttctatgagttccaacatgcacccagctatttcaagaatgtcaggccaccccacgtgaaggctgaccatgctgatgaggttccttttgtctttgggtccttcttctggggcataaaagttgacttcactgaggaggagaagctgctgagtaggcggatgatgaagtactgggccaattttgcaagacacgggaaccccaacagcgagggtctaccctactggcctgtgttggaccacgacgagcagtacctgcagttggacacccagcctgctgtggaccgagccctgaaggccagaaggctgcagttctggaccaagactctgccccagaagatccaggagctaaatggagctcagaaaaaccatgcagagctgtagtgtctggtgaaaggaacagagtgtgggagtgagggcaggtgggatcattctgagtttcaaagtctaattttctgttccaacacgcagaatcctttccaaccccaatattttccctttctgacatgaatgagaagccctccgtgtgttactctttattcttctgggcaaaatttaattggactcaataaaga

SEQ ID NO: 12200 - protein, 561 aa, Rattus norvegicus
  ref <308>: DATABASE ACCESSION NUMBER: SWISS-Prot / BAA25692
  ref <309>: DATABASE ENTRY DATE: 2002-03-01
MARKQPHSWLNAVLFGLLLILIHVWGQDSPESSSIRTTHTGQVRGKLDHVRDTKAGVHTFLGIPFAKAPVGPLRFAPPEDPEPWSGVRDGTSHPAMCLQNIDMLDEVGLTDMKMILSSIPMSEDCLYLNIYTPAHAHEGSNLPVMVCIHGGALVIGMASMCDGSLLAVNEDLVVVAIQYRLGVLGFFSTGDEHARGNWGYLDQVAALRWVQQNIAHFGGNPNRVTIFGVSAGGTSVSSHVISPMSQGLFHGAIMESGVALLPDLISETSETVSTTVAKLSGCEATDSETLVRCLRAKSGAEILVINKVFKMIPAVVDGEFLPRHPKELLASEDFRPVPSIIGVNTDEYCCTIPMVMGTAQIIKELSRENLQAVLKDTAAQMMLPPECGDLLMEEYMGNTDDPQTLQIQYAEMMGDFLFVIPALQVAHFQRSHAPVYFYEFQHAPSYFKNVRPPHVKADHADEVPFVFGSFFWGIKVDFTEEEKLLSRRMMKYWANFARHGNPNSEGLPYWPVLDHDEQYLQLDTQPAVDRALKARRLQFWTKTLPQKIQELNGAQKNHAEL

SEQ ID NO: 12201 - DNA, 2301 bp, Homo sapiens
  ref <308>: DATABASE ACCESSION NUMBER: Refseq / NM_003869
  ref <309>: DATABASE ENTRY DATE: 2002-11-05
tgactgctcagtcccgctctcctaccacacccacctttcccggcccaagccagcgcaccccgctgactccctgcccagtccaaactccaaggctgggcaaggcactgatccactgctggacagacccggggcagcctctgggtgaacagcagcgtgtccgccggcagcgaaccgagaccagcgagccgaccatgcggctgcacagacttcgtgcgcggctgagcgcggtggcctgtgggcttctgctgcttcttgtccggggccagggccaggactcagccagtcccatccggaccacacacacggggcaggtgctggggagtcttgtccatgtgaagggcgccaatgccggggtccaaaccttcctgggaattccatttgccaagccacctctaggtccgctgcgatttgcaccccctgagccccctgaatcttggagtggtgtgagggatggaaccacccatccggccatgtgtctacaggacctcaccgcagtggagtcagagtttcttagccagttcaacatgaccttcccttccgactccatgtctgaggactgcctgtacctcagcatctacacgccggcccatagccatgaaggctctaacctgccggtgatggtgtggatccacggtggtgcgcttgtttttggcatggcttccttgtatgatggttccatgctggctgccttggagaacgtggtggtggtcatcatccagtaccgcctgggtgtcctgggcttcttcagcactggagacaagcacgcaaccggcaactggggctacctggaccaagtggctgcactacgctgggtccagcagaatatcgcccactttggaggcaaccctgaccgtgtcaccatttttggcgagtctgcgggtggcacgagtgtgtcttcgcttgttgtgtcccccatatcccaaggactcttccacggagccatcatggagagtggcgtggccctcctgcccggcctcattgccagctcagctgatgtcatctccacggtggtggccaacctgtctgcctgtgaccaagttgactctgaggccctggtgggctgcctgcggggcaagagtaaagaggagattcttgcaattaacaagcctttcaagatgatccccggagtggtggatggggtcttcctgcccaggcacccccaggagctgctggcctctgccgactttcagcctgtccctagcattgttggtgtcaacaacaatgaattcggctggctcatccccaaggtcatgaggatctatgatacccagaaggaaatggacagagaggcctcccaggctgctctgcagaaaatgttaacgctgctgatgttgcctcctacatttggtgacctgctgagggaggagtacattggggacaatggggatccccagaccctccaagcgcagttccaggagatgatggcggactccatgtttgtgatccctgcactccaagtagcacattttcagtgttcccgggcccctgtgtacttctacgagttccagcatcagcccagctggctcaagaacatcaggccaccgcacatgaaggcagaccatggtgatgagcttccttttgttttcagaagtttctttgggggcaactacattaaattcactgaggaagaggagcagctaagcaggaagatgatgaagtactgggccaactttgcgagaaatgggaaccccaatggcgagggtctgccacactggccgctgttcgaccaggaggagcaatacctgcagctgaacctacagcctgcggtgggccgggctctgaaggcccacaggctccagttctggaagaaggcgctgccccaaaagatccaggagctcgaggagcctgaagagagacacacagagctgtagctccctgtgccggggaggagggggtgggttcgctgacaggcgagggtcagcctgctgtgcccacacacacccactaaggagaaagaagttgattccttcattcacttcgccattcattcatacttccgtccagaagttgattccttcattcacttcgccattcattcatacttccgtccatccattcagaaagcatttattaagaatttactcaggcatgatggcccatacttgtaatcccagctattgggaaggatgagatgggaggatggcttgaggccagaggtttgagaccgaccagccagggcaacacagtgagaccccttctcaaaaaaaaaaaaaaaaaaagagagagtgtgtgattagaagctaaataggaaagttttgagcttcaagtcagtgaggagtaaaaaagatttttaaaaagcaa

SEQ ID NO: 12202 - protein, 559 aa, Homo sapiens
  ref <308>: DATABASE ACCESSION NUMBER: Refseq / NP_003860
  ref <309>: DATABASE ENTRY DATE: 2002-11-05
MRLHRLRARLSAVACGLLLLLVRGQGQDSASPIRTTHTGQVLGSLVHVKGANAGVQTFLGIPFAKPPLGPLRFAPPEPPESWSGVRDGTTHPAMCLQDLTAVESEFLSQFNMTFPSDSMSEDCLYLSIYTPAHSHEGSNLPVMVWIHGGALVFGMASLYDGSMLAALENVVVVIIQYRLGVLGFFSTGDKHATGNWGYLDQVAALRWVQQNIAHFGGNPDRVTIFGESAGGTSVSSLVVSPISQGLFHGAIMESGVALLPGLIASSADVISTVVANLSACDQVDSEALVGCLRGKSKEEILAINKPFKMIPGVVDGVFLPRHPQELLASADFQPVPSIVGVNNNEFGWLIPKVMRIYDTQKEMDREASQAALQKMLTLLMLPPTFGDLLREEYIGDNGDPQTLQAQFQEMMADSMFVIPALQVAHFQCSRAPVYFYEFQHQPSWLKNIRPPHMKADHGDELPFVFRSFFGGNYIKFTEEEEQLSRKMMKYWANFARNGNPNGEGLPHWPLFDQEEQYLQLNLQPAVGRALKAHRLQFWKKALPQKIQELEEPEERHTEL

SEQ ID NO: 12203 - DNA, 1269 bp, Rattus norvegicus; identical to SEQ ID NO: 245
  ref <308>: DATABASE ACCESSION NUMBER: EMBL / AB015191
  ref <309>: DATABASE ENTRY DATE: 1998-08-21

SEQ ID NO: 12204 - protein, 422 aa, Rattus norvegicus; identical to SEQ ID NO: 246
  ref <308>: DATABASE ACCESSION NUMBER: Refseq / NP_071950
  ref <309>: DATABASE ENTRY DATE: 2002-11-05

SEQ ID NO: 12205 - DNA, 1330 bp, Homo sapiens
  ref <308>: DATABASE ACCESSION NUMBER: EMBL / Z97026
  ref <309>: DATABASE ENTRY DATE: 1999-01-08
tgcacagagacggacacaggatgagctctaagtacccgcggtctgtccggcgctgcctgcccctctgggccctaacactggaagcagctctcattctcctcttctatttttttacccactatgacgcttccttagaggatcaaaaggggctcgtggcatcctatcaagttggccaagatctgaccgtgatggcggccattggcttgggcttcctcacctcgagtttccggagacacagctggagcagtgtggccttcaacctcttcatgctggcgcttggtgtgcagtgggcaatcctgctggacggcttcctgagccagttcccttctgggaaggtggtcatcacactgttcagtattcggctggccaccatgagtgctatgtcggtgctgatctcagcgggtgctgtcttggggaaggtcaacttggcgcagttggtggtgatggtgctggtggaggtgacagctttaggcaccctgaggatggtcatcagtaatatcttcaacacagactaccacatgaacctgaggcacttctacgtgttcgcagcctattttgggctgactgtggcctggtgcctgccaaagcctctacccaagggaacggaggataatgatcagagagcaacgatacccagtttgtctgccatgctgggcgccctcttcttgtggatgttctggccaagtgtcaactctgctctgctgagaagtccaatccaaaggaagaatgccatgttcaacacctactatgctctagcagtcagtgtggtgacagccatctcagggtcatccttggctcacccccaaaggaagatcagcatgacttatgtgcacagtgcggtgttggcaggaggcgtggctgtgggtacctcgtgtcacctgatcccttctccgtggcttgccatggtgctgggtcttgtggctgggctgatctccatcgggggagccaagtgcctgccggggtgttgtaaccgagtgctggggattccccacagctccatcatgggctacaacttcagcttgctgggtctgcttggagagatcatctacattgtgctgctggtgcttgataccgtcggagccggcaatggcatgattggcttccaggtcctcctcagcattggggaactcagcttggccatcgtgatagctctcacgtctggtctcctgacaggtttgctcctaaatcttaaaatatggaaagcacctcatgaggctaaatattttgatgaccaagttttctggaagtttcctcatttggctgttggattttaagcaaaagcatccaagaaaaacaaggcctgttcaaaaacaagacaacttcctctcac

SEQ ID NO: 12206 - protein, 417 aa, Homo sapiens
  ref <308>: DATABASE ACCESSION NUMBER: SWISS-Prot / CAB09722
  ref <309>: DATABASE ENTRY DATE: 2003-02-01
MSSKYPRSVRRCLPLWALTLEAALILLFYFFTHYDASLEDQKGLVASYQVGQDLTVMAAIGLGFLTSSFRRHSWSSVAFNLFMLALGVQWAILLDGFLSQFPSGKVVITLFSIRLATMSAMSVLISAGAVLGKVNLAQLVVMVLVEVTALGTLRMVISNIFNTDYHMNLRHFYVFAAYFGLTVAWCLPKPLPKGTEDNDQRATIPSLSAMLGALFLWMFWPSVNSALLRSPIQRKNAMFNTYYALAVSVVTAISGSSLAHPQRKISMTYVHSAVLAGGVAVGTSCHLIPSPWLAMVLGLVAGLISIGGAKCLPGCCNRVLGIPHSSIMGYNFSLLGLLGEIIYIVLLVLDTVGAGNGMIGFQVLLSIGELSLAIVIALTSGLLTGLLLNLKIWKAPHEAKYFDDQVFWKFPHLAVGF

SEQ ID NO: 12207 - DNA, 1269 bp, Rattus norvegicus; identical to SEQ ID NO: 245
  ref <308>: DATABASE ACCESSION NUMBER: EMBL / AB015191
  ref <309>: DATABASE ENTRY DATE: 1998-08-21

SEQ ID NO: 12208 - protein, 422 aa, Rattus norvegicus; identical to SEQ ID NO: 246
  ref <308>: DATABASE ACCESSION NUMBER: Refseq / NP_071950
  ref <309>: DATABASE ENTRY DATE: 2002-11-05

SEQ ID NO: 12209 - DNA, 1330 bp, Homo sapiens; identical to SEQ ID NO: 12205
  ref <308>: DATABASE ACCESSION NUMBER: EMBL / Z97026
  ref <309>: DATABASE ENTRY DATE: 1999-01-08

SEQ ID NO: 12210 - protein, 417 aa, Homo sapiens; identical to SEQ ID NO: 12206
  ref <308>: DATABASE ACCESSION NUMBER: SWISS-Prot / CAB09722
  ref <309>: DATABASE ENTRY DATE: 2003-02-01

SEQ ID NO: 12211 - DNA, 3455 bp, Rattus norvegicus
  ref <308>: DATABASE ACCESSION NUMBER: EMBL / AB015432
  ref <309>: DATABASE ENTRY DATE: 1998-09-23
cgcggagagcggctcggccgcgcgcacgccgggtatccaggccgagccgggaacgtcgagagcatggcggtcgcgggcgcaaagcggcgcgcggttgcggcccccgcgacgacggcggcggaggaggagcggcaggcgcgggagaagatgctggaggcgcggcgcggggacggcgcggaccccgagggcgaaggcgtgaccctgcagcgcaatatcacactgatcaatggtgtggccatcatagtgggcaccatcatcggttcgggcatcttcgtgacgcccaccggcgtgctcaaggaagccggctcgcccggactgtcgcttgtggtgtgggctgtgtgcggcgtcttctccatcgtgggcgcactgtgctacgcggagctgggcactaccatctcaaagtcaggcggcgactatgcctacatgctagaggtctacggctcgctgcccgccttcctcaagctctggatcgagctgctcatcattcggccctcctcacagtacatcgtggcgctggtcttcgccacatacctgctcaagccggtcttccccacttgtcccgtgcccgaggaggctgccaagctcgtggcctgcctctgcgtgctactactcacggctgtgaactgctacagtgtgaaggctgctacccgtgtgcaggatgcctttgcggctgccaaactgctggccctggccctcatcatcctgctcggcttcatccagatgggaaaggacataggacaaggggatgcatccaacctgcaccagaagttgtcctttgaaggcaccaatctggacgtggggaacattgtgttggcattgtacagtggcctcttcgcctacggaggatggaactatctgaattttgtcacggaggagatgatcaacccctacaggaacctccccctggccatcatcatctccttgcccattgtcaccctggtctatgtgctgacgaacctggcctacttcactaccctgtctaccaaccagatgctgacatctgaagccgtggctgtggattttgggaactaccacctgggagtcatgtcctggatcattcctgtcttcgtgggcttgtcctgcttcggctctgtcaatgggtctctgttcacgtcctcaagactgttcttcgtgggatccagggagggccacctgccttccatcctctccatgatccacccacagcttctgacaccggtgccatcactggtgttcacgtgtgtcatgaccctgatgtacgccttctccagagacatcttctccatcatcaacttcttcagcttcttcaactggctgtgtgtggccctggccatcatcggcatgatgtggctccgctttaagaagcctgagctggagcgtcccatcaaggtgaatctggccctcccagtgttctttatcctggcctgcctcttcctcatcgccgtgtccttctggaagacacccctggagtgcggcattggcttcgccatcatcctcagcgggctgcctgtctacttctttggtgtgtggtggaaaaacaagcccaaatggatcctgcaggtcatcttctccgtgaccgtgctctgccagaagctgatgcaggtggttcctcaggagacttagccacgtgtcctgggtgccgcgggagagtgcactgtgactgcttccagacaactcacctttggaaaagcagcgtccaggcccgtcatccccacagctccagtgagcaccactaactatcttaacaccatccgctgtccctcaaaggtcaggtgtccacagtggccgtgaaagaaacctggtacgaatttggtcccagatggtgaccatccatgcatacatagcagccactgtgaggtgtgctgtggcctgaggcctggtctttctgactttggggactgccacatctgggctttctcctctatgattttttgttttgtttttgtagcgttcatttgggtcaagtttacactaccgagatgattattttttgacaaaacagggtagcaaagagcaggagatggtgtggccggacagtccggctctgagtgggaactgcaggccacagctcttctccgactgttgttcgttcagtagcacattgtggctggaggggaccacatcactgtcaccaagtcagaactactgagactcaaacatcaccttttccactgtggacttgcactgacaaacggacgatgaatgtgctagcttgggtttgagttttctgggtctgtcctagagatgaaaccccaacctgacccacgaggcagagctctactgtgggtcatttgttccattgtaaatgcagagctccggtctgaccactctgaagtcctggtgattccccttcccctggctccaaatgaaagacctctgcagccataaccctagtggcacctggccaccaactgtcaactgcggggccatgtgctcctgtgcacacaagctggctctacacattcaaggggcactgctctgggtcttactccctgtcccaccccagctctcctagaaccagaccggcaccatggggctccaccacacacctctgtccacctccataattcctgagactgctagcagctctctgtcaagtcaccaccgtcccccctcagccccccgggccactgttcaaaagaataggcaccaactacccttctgctctctgccacctgtgtgacgtgaccactccagctccctgagcgtgaaaactgctggctacgtgctgctgtccctcctgtgtgggaccagtctgttccggggagacggttgagtccagcagcacatccactgaagcagctgatctgactgaaggacttgagggcatgagaatcccccgctggcccttccattgcctcagagctggcctccctgagggggtgtcaactggagtgtctactgtgaagctcttacatagtggcaccctgatatctcctggggttcccttgtgttggggtgaggaggcagaggtcaaggtcagagtgcccctagaaggctctccagagatgtgaactcaggtccccagacacaagcctgggttcaaagggcagggcaagtcttggtccacgttcatggtgctgacccaggccctctgagaaggccctgtcattcctattctgatgtcctgaggacgcccatctgtaggtttttggttttaaatcaagccacagccacagtcatttggcccaatgctttgcattgtgttgtcctaacacatcactgccctgtggaacccccctgcctggcccttttcagtggtcagtgtccagtgctgggtacggtgtgttcccaccacactgggtccacctgctgtgccactggacttagtgctgtggttgtaatgtcttttactattgtattaatgactagtctgttacattagactgggggtggggtgcaagggtctgctggtttgtgaggctttttgattgggggggtggtttgttttttttttttaaagctattggagttct

SEQ ID NO: 12212 - protein, 512 aa, Rattus norvegicus
  ref <308>: DATABASE ACCESSION NUMBER: SWISS-Prot / BAA33035
  ref <309>: DATABASE ENTRY DATE: 2001-10-16
MAVAGAKRRAVAAPATTAAEEERQAREKMLEARRGDGADPEGEGVTLQRNITLINGVAIIVGTIIGSGIFVTPTGVLKEAGSPGLSLVVWAVCGVFSIVGALCYAELGTTISKSGGDYAYMLEVYGSLPAFLKLWIELLIIRPSSQYIVALVFATYLLKPVFPTCPVPEEAAKLVACLCVLLLTAVNCYSVKAATRVQDAFAAAKLLALALIILLGFIQMGKDIGQGDASNLHQKLSFEGTNLDVGNIVLALYSGLFAYGGWNYLNFVTEEMINPYRNLPLAIIISLPIVTLVYVLTNLAYFTTLSTNQMLTSEAVAVDFGNYHLGVMSWIIPVFVGLSCFGSVNGSLFTSSRLFFVGSREGHLPSILSMIHPQLLTPVPSLVFTCVMTLMYAFSRDIFSIINFFSFFNWLCVALAIIGMMWLRFKKPELERPIKVNLALPVFFILACLFLIAVSFWKTPLECGIGFAIILSGLPVYFFGVWWKNKPKWILQVIFSVTVLCQKLMQVVPQET

SEQ ID NO: 12213 - DNA, 4539 bp, Homo sapiens
  ref <308>: DATABASE ACCESSION NUMBER: Refseq / NM_003486
  ref <309>: DATABASE ENTRY DATE: 2002-11-04
cggcgcgcacactgctcgctgggccgcggctcccgggtgtcccaggcccggccggtgcgcagagcatggcgggtgcgggcccgaagcggcgcgcgctagcggcgccggcggccgaggagaaggaagaggcgcgggagaagatgctggccgccaagagcgcggacggctcggcgccggcaggcgagggcgagggcgtgaccctgcagcggaacatcacgctgctcaacggcgtggccatcatcgtggggaccattatcggctcgggcatcttcgtgacgcccacgggcgtgctcaaggaggcaggctcgccggggctggcgctggtggtgtgggccgcgtgcggcgtcttctccatcgtgggcgcgctctgctacgcggagctcggcaccaccatctccaaatcgggcggcgactacgcctacatgctggaggtctacggctcgctgcccgccttcctcaagctctggatcgagctgctcatcatccggccttcatcgcagtacatcgtggccctggtcttcgccacctacctgctcaagccgctcttccccacctgcccggtgcccgaggaggcagccaagctcgtggcctgcctctgcgtgctgctgctcacggccgtgaactgctacagcgtgaaggccgccacccgggtccaggatgcctttgccgccgccaagctcctggccctggccctgatcatcctgctgggcttcgtccagatcgggaagggtgatgtgtccaatctagatcccaacttctcatttgaaggcaccaaactggatgtggggaacattgtgctggcattatacagcggcctctttgcctatggaggatggaattacttgaatttcgtcacagaggaaatgatcaacccctacagaaacctgcccctggccatcatcatctccctgcccatcgtgacgctggtgtacgtgctgaccaacctggcctacttcaccaccctgtccaccgagcagatgctgtcgtccgaggccgtggccgtggacttcgggaactatcacctgggcgtcatgtcctggatcatccccgtcttcgtgggcctgtcctgcttcggctccgtcaatgggtccctgttcacatcctccaggctcttcttcgtggggtcccgggaaggccacctgccctccatcctctccatgatccacccacagctcctcacccccgtgccgtccctcgtgttcacgtgtgtgatgacgctgctctacgccttctccaaggacatcttctccgtcatcaacttcttcagcttcttcaactggctctgcgtggccctggccatcatcggcatgatctggctgcgccacagaaagcctgagcttgagcggcccatcaaggtgaacctggccctgcctgtgttcttcatcctggcctgcctcttcctgatcgccgtctccttctggaagacacccgtggagtgtggcatcggcttcaccatcatcctcagcgggctgcccgtctacttcttcggggtctggtggaaaaacaagcccaagtggctcctccagggcatcttctccacgaccgtcctgtgtcagaagctcatgcaggtggtcccccaggagacatagccaggaggccgagtggctgccggaggagcatgcgcagaggccagttaaagtagatcacctcctcgaacccactccggttccccgcaacccacagctcagctgcccatcccagtccctcgccgtccctcccaggtcgggcagtggaggctgctgtgaaaactctggtacgaatctcatccctcaactgagggccagggacccaggtgtgcctgtgctcctgcccaggagcagcttttggtctccttgggccctttttcccttccctcctttgtttacttatatatatattttttttaaacttaaattttgggtcaacttgacaccactaagatgattttttaaggagctgggggaaggcaggagccttcctttctcctgccccaagggcccagaccctgggcaaacagagctactgagacttggaacctcattgctacgacagacttgcactgaagccggacagctgcccagacacatgggcttgtgacattcgtgaaaaccaaccctgtgggcttatgtctctgccttagggtttgcagagtggaaactcagccgtagggtggcactgggagggggtgggggatctgggcaaggtgggtgattcctcccaggaggtgcttgaggccccgatggactcctgaccataatcctagccccgagacaccatcctgagccagggaacagccccagggttggggggtgccggcatctcccctagctcaccaggcctggcctctgggcagtgtggcctcttggctatttctgttccagttttggaggctgagttctggttcatgcagacaaagccctgtccttcagtcttctagaaacagagacaagaaaggcagacacaccgcggccaggcacccatgtgggcgcccaccctgggctccacacagcagtgtcccctgccccagaggtcgcagctaccctcagcctccaatgcattggcctctgtaccgcccggcagccccttctggccggtgctgggttcccactcccggcctaggcacctccccgctctccctgtcacgctcatgtcctgtcctggtcctgatgcccgttgtctaggagacagagccaagcactgctcacgtctctgccgcctgcgtttggaggcccctgggctctcacccagtccccacccgcctgcagagagggaactagggcaccccttgtttctgttgttcccgtgaatttttttcgctatgggaggcagccgaggcctggccaatgcggcccactttcctgagctgtcgctgcctccatggcagcagccaaggacccccagaacaagaagacccccccgcaggatccctcctgagctcggggggctctgccttctcaggccccgggcttcccttctccccagccagaggtggagccaagtggtccagcgtcactccagtgctcagctgtggctggaggagctggcctgtggcacagccctgagtgtcccaagccgggagccaacgaagccggacacggcttcactgaccagcggctgctcaagccgcaagctctcagcaagtgcccagtggagcctgccgcccccacctgggcaccgggaccccctcaccatccagtgggcccggagaaacctgatgaacagtttggggactcaggaccagatgtccgtctctcttgcttgaggaatgaagacctttattcacccctgccccgttgcttcccgctgcacatggacagacttcacagcgtctgctcataggacctgcatccttcctggggacgaattccactcgtccaagggacagcccacggtctggaggccgaggaccaccagcaggcaggtggactgactgtgttgggcaagacctcttccctctgggcctgttctcttggctgcaaataaggacagcagctggtgccccacctgcctggtgcattgctgtgtgaatccaggaggcagtggacatcgtaggcagccacggccccgggtccaggagaagtgctccctggaggcacgcaccactgcttcccactggggccggcggggcccacgcacgacgtcagcctcttaccttcccgcctcggctaggggtcctcgggatgccgttctgttccaacctcctgctctgggaggtggacatgcctcaaggatacagggagccggcggcctctcgacggcacgcacttgcctgttggctgctgcggctgtgggcgagcatgggggctgccagcgtctgttgtggaaagtagctgctagtgaaatggctggggccgctggggtccgtcttcacactgcgcaggtctcttctgggcgtctgagctggggtgggagctcctccgcagaaggttggtggggggtccagtctgtgatccttggtgctgtgtgccccactccagcctggggaccccacttcagaaggtaggggccgtgtcccgcggtgctgactgaggcctgcttccccctccccctcctgctgtgctggaattccacagggaccagggccaccgcaggggactgtctcagaagacttgatttttccgtccctttttctccacactccactgacaaacgtccccagcggtttccacttgtgggcttcaggtgttttcaagcacaacccaccacaacaagcaagtgcattttcagtcgttgtgcttttttgttttgtgctaacgtcttactaatttaaagatgctgtcggcaccatgtttatttatttccagtggtcatgctcagccttgctgctctgcgtggcgcaggtgccatgcctgctccctgtctgtgtcccagccacgcagggccatccactgtgacgtcggccgaccaggctggacaccctctgccgagtaatgacgtgtgtggctgggaccttctttattctgtgttaatggctaacctgttacactgggctgggttgggtagggtgttctggcttttttgtggggtttttatttttaaagaaacactcaatcatcctag

SEQ ID NO: 12214 - protein, 507 aa, Homo sapiens
  ref <308>: DATABASE ACCESSION NUMBER: Refseq / NP_003477
  ref <309>: DATABASE ENTRY DATE: 2002-11-04
MAGAGPKRRALAAPAAEEKEEAREKMLAAKSADGSAPAGEGEGVTLQRNITLLNGVAIIVGTIIGSGIFVTPTGVLKEAGSPGLALVVWAACGVFSIVGALCYAELGTTISKSGGDYAYMLEVYGSLPAFLKLWIELLIIRPSSQYIVALVFATYLLKPLFPTCPVPEEAAKLVACLCVLLLTAVNCYSVKAATRVQDAFAAAKLLALALIILLGFVQIGKGDVSNLDPNFSFEGTKLDVGNIVLALYSGLFAYGGWNYLNFVTEEMINPYRNLPLAIIISLPIVTLVYVLTNLAYFTTLSTEQMLSSEAVAVDFGNYHLGVMSWIIPVFVGLSCFGSVNGSLFTSSRLFFVGSREGHLPSILSMIHPQLLTPVPSLVFTCVMTLLYAFSKDIFSVINFFSFFNWLCVALAIIGMIWLRHRKPELERPIKVNLALPVFFILACLFLIAVSFWKTPVECGIGFTIILSGLPVYFFGVWWKNKPKWLLQGIFSTTVLCQKLMQVVPQET

SEQ ID NO: 12215 - DNA, 3202 bp, Rattus norvegicus; identical to SEQ ID NO: 257
  ref <308>: DATABASE ACCESSION NUMBER: EMBL / AB016161
  ref <309>: DATABASE ENTRY DATE: 1999-01-22

SEQ ID NO: 12216 - protein, 991 aa, Rattus norvegicus; identical to SEQ ID NO: 258
  ref <308>: DATABASE ACCESSION NUMBER: SWISS-Prot / Q9Z0U4
  ref <309>: DATABASE ENTRY DATE: 2001-10-16

SEQ ID NO: 12217 - DNA, 4445 bp, Homo sapiens; identical to SEQ ID NO: 259
  ref <308>: DATABASE ACCESSION NUMBER: EMBL / AJ225028
  ref <309>: DATABASE ENTRY DATE: 1998-12-11

SEQ ID NO: 12218 - protein, 961 aa, Homo sapiens; identical to SEQ ID NO: 260
  ref <308>: DATABASE ACCESSION NUMBER: SWISS-Prot / Q9UBS5
  ref <309>: DATABASE ENTRY DATE: 2002-06-15

SEQ ID NO: 12219 - DNA, 3202 bp, Rattus norvegicus; identical to SEQ ID NO: 257
  ref <308>: DATABASE ACCESSION NUMBER: EMBL / AB016161
  ref <309>: DATABASE ENTRY DATE: 1999-01-22

SEQ ID NO: 12220 - protein, 991 aa, Rattus norvegicus; identical to SEQ ID NO: 258
  ref <308>: DATABASE ACCESSION NUMBER: SWISS-Prot / Q9Z0U4
  ref <309>: DATABASE ENTRY DATE: 2001-10-16

SEQ ID NO: 12221 - DNA, 4445 bp, Homo sapiens; identical to SEQ ID NO: 259
  ref <308>: DATABASE ACCESSION NUMBER: EMBL / AJ225028
  ref <309>: DATABASE ENTRY DATE: 1998-12-11

SEQ ID NO: 12222 - protein, 961 aa, Homo sapiens; identical to SEQ ID NO: 260
  ref <308>: DATABASE ACCESSION NUMBER: SWISS-Prot / Q9UBS5
  ref <309>: DATABASE ENTRY DATE: 2002-06-15

SEQ ID NO: 12223 - DNA, 2366 bp, Rattus norvegicus
  ref <308>: DATABASE ACCESSION NUMBER: EMBL / AB016425
  ref <309>: DATABASE ENTRY DATE: 1999-01-11
gaattccggccgctggaatgttgtgtgaactttgctctccgtctattctctgatttgtcaagaaaagccaatcaaccaatagctgaggagagaagagctggacttctgattctagggaggggaggagcaaagagagaagattcaccatgcagaaaggacccaggagctgccatgggcacacacctgggaaggtcgaaaatgctgcaacagtataaggaaatgttcccggaagaactcttaaacactttggcaccagcaatttcggtgagcggttcttctgtgtatgacagattctgttctgcaaaaaattcccgaatcccaatttcactgatttctacaccaactacagtgtggccccggtctgcgaaccatttcatctcaatggcttttccacagagcgggaaaaacactctcagtccactctgccctttaagaaatgtatcgaaatgcttctttaatagctgatgcccttgctcctgatggaatgcgatgtgacgggtctcccacttgtcttgggagccttgacatcttgttcatcataaagatcaggtgaccagtgacatcagccatgtctgtgaggccttttgagagtccacctccttacaggccggatgaattcaaacccaatcattatgcaccaagcaatgacatgtatggcggagagatgcacgttcgaccaatgctctctcagccggcatactctttttacccggaagacgaaattcttcacttctacaagtggacgtcgcctccaggggtgattcggatcctgtctatgctcgtcatcgtgatgtgcatcgctgtattcgcctgcgtggcttccacacttgcttgggacagagcctatggaacgggcatctttggaggaagtatgaactacccttacggcagcggcttcggtagctatggaggtggcttcggaggttacggttacggctacggttacggttatggaggttacacagaccccagagcggcaaagggtttcctgctggccatggcggccttttgcttcatcgcttccttggtgatctttgttaccagcgtcattagatcgggaatgtcaagaacgagaagatactacttgatcgtgatcatagtcagcgcaatcctgggcatcatggtgttcattgccacgatcgtgtacataatgggagtcaacccgactgcccaggcttctggatctatgtacggttcacagatctataccatctgcagccagttttatactcctggaggcactggtctctacgtggaccaatatttgtatcactactgtgtggtggatccccaggaggctatagccattgtcctggggttcatgattattgtggcttttgctttaatcattgtttttgctgtgaaaacccgaagaaagatggaccggtatgataggtctaatattttgtgggataaggaacacatttatgatgaacagccccctaatgtggaagagtgggttaaaaatgtgtctgcaggcacacaagacatgcctccacccccatctgattatgcggaaagagtcgacagtccaatggcatactcctccaacggcaaagtgaatggcaagagatcctacccagactctttgtataagtcaccgcctctggtacctgaagtagcccaggagattcctctgaccttgtccgtggatgacttcaggcagcctcggtacagcagcaacgataacctagagacaccttctaaaaggactcccacgaaggggaaagcagggaaggcgaagaggacagacccagaccactatgaaaccgactacacgacaggtggcgagtcctgcgatgagctggaggaggactggctcagggaatatccacctatcacttcagatcaacagagacaactgtacaagagaaattttgatgcaggtttacaggagtataagagtttactggcagaactcgacgaggtcaacaaagagctctctcgtctcgacagagaactggatgactacagagaggagagcgaagagtacatggctgctgctgatgaatataacagactaaagcaagttaagggatctgcagattataaaagcaagaagaattactgcaagcagttaaagagcaaattatcacacatcaagaggatggtgggagactatgacagacggaaaacctagacagatgctggttgctggagaagtgagatagaggtgcatctatctacctgcccagtgtctgcagttctccccagaggcaaactgactttggactctcgtctgggaagttaaaactttgtgatcattacaaagtttccatagctttaataccatccgtttcctgtctccagtattgaagcattttataaatggcttttgataattgactgggctgaacactccaatt

SEQ ID NO: 12224 - protein, 523 aa, Rattus norvegicus
  ref <308>: DATABASE ACCESSION NUMBER: SWISS-Prot / BAA36681
  ref <309>: DATABASE ENTRY DATE: 2002-10-01
MSVRPFESPPPYRPDEFKPNHYAPSNDMYGGEMHVRPMLSQPAYSFYPEDEILHFYKWTSPPGVIRILSMLVIVMCIAVFACVASTLAWDRAYGTGIFGGSMNYPYGSGFGSYGGGFGGYGYGYGYGYGGYTDPRAAKGFLLAMAAFCFIASLVIFVTSVIRSGMSRTRRYYLIVIIVSAILGIMVFIATIVYIMGVNPTAQASGSMYGSQIYTICSQFYTPGGTGLYVDQYLYHYCVVDPQEAIAIVLGFMIIVAFALIIVFAVKTRRKMDRYDRSNILWDKEHIYDEQPPNVEEWVKNVSAGTQDMPPPPSDYAERVDSPMAYSSNGKVNGKRSYPDSLYKSPPLVPEVAQEIPLTLSVDDFRQPRYSSNDNLETPSKRTPTKGKAGKAKRTDPDHYETDYTTGGESCDELEEDWLREYPPITSDQQRQLYKRNFDAGLQEYKSLLAELDEVNKELSRLDRELDDYREESEEYMAAADEYNRLKQVKGSADYKSKKNYCKQLKSKLSHIKRMVGDYDRRKT

SEQ ID NO: 12225 - DNA, 2648 bp, Homo sapiens
  ref <308>: DATABASE ACCESSION NUMBER: Refseq / NM_002538
  ref <309>: DATABASE ENTRY DATE: 2000-10-31
gcctctctccatcagacaccccaaggttccatccgaagcaggcggagcaccgaacgcaccccggggtggtcagggacccccatccgtgctgccccctaggagcccgcgcctctcctctgcgccccgcctctcgggccgcaacatcgcgcggttcctttaacagcgcgctggcagggtgtgggaagcaggaccgcgtcctcccgccccctcccatccgagtttcaggtgaattggtcaccgagggaggaggccgacacaccacacctacactcccgcgtccacctctccctccctgcttcctctggcggaggcggcaggaaccgagagccaggtccagagcgccgaggagccggtctaggacgcagcagattggtttatcttggaagctaaagggcattgctcatcctgaagatcagctgaccattgacaatcagccatgtcatccaggcctcttgaaagtccacctccttacaggcctgatgaattcaaaccgaatcattatgcaccaagcaatgacatatatggtggagagatgcatgttcgaccaatgctctctcagccagcctactctttttacccagaagatgaaattcttcacttctacaaatggacctctcctccaggagtgattcggatcctgtctatgctcattattgtgatgtgcattgccatctttgcctgtgtggcctccacgcttgcctgggacagaggctatggaacttcccttttaggaggtagtgtaggctacccttatggaggaagtggctttggtagctacggaagtggctatggctatggctatggttatggctatggctacggaggctatacagacccaagagcagcaaagggcttcatgttggccatggctgccttttgtttcattgccgcgttggtgatctttgttaccagtgttataagatctgaaatgtccagaacaagaagatactacttaagtgtgataatagtgagtgctatcctgggcatcatggtgtttattgccacaattgtctatataatgggagtgaacccaactgctcagtcttctggatctctatatggttcacaaatatatgccctctgcaaccaattttatacacctgcagctactggactctacgtggatcagtatttgtatcactactgtgttgtggatccccaggaggccattgccattgtactggggttcatgattattgtggcttttgctttaataattttctttgctgtgaaaactcgaagaaagatggacaggtatgacaagtccaatattttgtgggacaaggaacacatttatgatgagcagccccccaatgtcgaggagtgggttaaaaatgtgtctgcaggcacacaggacgtgccttcacccccatctgactatgtggaaagagttgacagtcccatggcatactcttccaatggcaaagtgaatgacaagcggttttatccagagtcttcctataaatccacgccggttcctgaagtggttcaggagcttccattaacttcgcctgtggatgacttcaggcagcctcgttacagcagcggtggtaactttgagacaccttcaaaaagagcacctgcaaagggaagagcaggaaggtcaaagagaacagagcaagatcactatgagacagactacacaactggcggcgagtcctgtgatgagctggaggaggactggatcagggaatatccacctatcacttcagatcaacaaagacaactgtacaagaggaattttgacactggcctacaggaatacaagagcttacaatcagaacttgatgagatcaataaagaactctcccgtttggataaagaattggatgactatagagaagaaagtgaagagtacatggctgctgctgatgaatacaatagactgaagcaagtgaagggatctgcagattacaaaagtaagaagaatcattgcaagcagttaaagagcaaattgtcacacatcaagaagatggttggagactatgatagacagaaaacatagaaggctgatgccaagttgtttgagaaattaagtatctgacatctctgcaatcttctcagaaggcaaatgactttggaccataaccccggaagccaaacctctgtgagcatcacaaagttttggttgctttaacatcatcagtattgaagcattttataaatcgcttttgataatcaactgggctgaacactccaattaaggattttatgctttaaacattggttcttgtattaagaatgaaatactgtttgaggtttttaagccttaaaggaaggttctggtgtgaactaaactttcacaccccagacgatgtcttcatacctacatgtatttgtttgcataggtgatctcatttaatcctctcaaccacctttcagataactgttatttataatcacttttttccacataaggaaactgggttcctgcaatgaagtctctgaagtgaaactgcttgtttcctagcacacacttttggttaagtctgttttatgacttcattaataataaattccctggcctttcatattttagctactatatatgtgatgatctaccagcctccctattttttttctgttatataaatggttaaaagaggtttttcttaaataataaagatcatgtaaaagtaaaaaaaaaa

SEQ ID NO: 12226 - protein, 522 aa, Homo sapiens
  ref <308>: DATABASE ACCESSION NUMBER: Refseq / NP_002529
  ref <309>: DATABASE ENTRY DATE: 2000-10-31
MSSRPLESPPPYRPDEFKPNHYAPSNDIYGGEMHVRPMLSQPAYSFYPEDEILHFYKWTSPPGVIRILSMLIIVMCIAIFACVASTLAWDRGYGTSLLGGSVGYPYGGSGFGSYGSGYGYGYGYGYGYGGYTDPRAAKGFMLAMAAFCFIAALVIFVTSVIRSEMSRTRRYYLSVIIVSAILGIMVFIATIVYIMGVNPTAQSSGSLYGSQIYALCNQFYTPAATGLYVDQYLYHYCVVDPQEAIAIVLGFMIIVAFALIIFFAVKTRRKMDRYDKSNILWDKEHIYDEQPPNVEEWVKNVSAGTQDVPSPPSDYVERVDSPMAYSSNGKVNDKRFYPESSYKSTPVPEVVQELPLTSPVDDFRQPRYSSGGNFETPSKRAPAKGRAGRSKRTEQDHYETDYTTGGESCDELEEDWIREYPPITSDQQRQLYKRNFDTGLQEYKSLQSELDEINKELSRLDKELDDYREESEEYMAAADEYNRLKQVKGSADYKSKKNHCKQLKSKLSHIKKMVGDYDRQKT

SEQ ID NO: 12227 - DNA, 776 bp, Rattus norvegicus
  ref <308>: DATABASE ACCESSION NUMBER: EMBL / AB017596
  ref <309>: DATABASE ENTRY DATE: 1999-07-12
tggcgatggagcgcgacggcgaacaggcagggcaagggccccggcatgggccagcgggaaacggccgcgagctggagtctccagccgccgcttcgctgctggcgcccatggacctaggggaggagccgctggagaaggcggagcgtgcgcgcaccgccaaagaccccaacacttacaaagtgctgtcgctggttttgtcagtatgcgtgctaacaactattcttggttgtatccttgggttgaaaccaagctgtgccaaagaagtgaaaagttgcaaaggccgctgctttgaaaggacgttcagcaattgtcgctgcgatgctgcctgtgtcagccttgggaactgctgtctggatttccaagagacctgtgtggaaccaacacatatatggacttgcaacaagttcaggtgcggcgagaagaggctgtccagatttgtgtgctcctgtgcggacgactgcaaagcccacaatgactgttgcatcaactacagttcagtgtgccaagaaaagaagagttgggtagaagaagcctgcgaaaccatcgatgcaccacagtgtccagcagagtttgaatcaccccctactctcttgttttctttggatggattcagagctgaatatttgcacacttggggtggacttcttcctgtcattagcaagctgaaaaactgtggaacgtacactaaaaacatgaggcctgtgtaccctaccaagacgtttcccaatcattacagcatcgtcacaggactttatccagaatcacatggcataatt

SEQ ID NO: 12228 - protein, 257 aa, Rattus norvegicus
  ref <308>: DATABASE ACCESSION NUMBER: SWISS-Prot / BAA33393
  ref <309>: DATABASE ENTRY DATE: 2002-10-01
MERDGEQAGQGPRHGPAGNGRELESPAAASLLAPMDLGEEPLEKAERARTAKDPNTYKVLSLVLSVCVLTTILGCILGLKPSCAKEVKSCKGRCFERTFSNCRCDAACVSLGNCCLDFQETCVEPTHIWTCNKFRCGEKRLSRFVCSCADDCKAHNDCCINYSSVCQEKKSWVEEACETIDAPQCPAEFESPPTLLFSLDGFRAEYLHTWGGLLPVISKLKNCGTYTKNMRPVYPTKTFPNHYSIVTGLYPESHGII

SEQ ID NO: 12229 - DNA, 890 bp, Homo sapiens
  ref <308>: DATABASE ACCESSION NUMBER: EMBL / AF110304
  ref <309>: DATABASE ENTRY DATE: 2000-03-03
attctcctagcatgggaagcatgactcctcatgggttgaagaattgttaatgttacacagagcacggatcacagatgttgagcacatcactggactcagcttctatcaacaaagaaaagagccagtttcagacattttaaagttgaaaacacatttgccaacctttagccaagaagactgatatgttttttatccccaaacaccatgaatctttttgagagaaccttatattttatatagtcctctagctacactattgcattgttcagaaactgtcgaccagagttagaacggagccctcggtgatgcggacatctcagggaaacttgcgtactcagcacagcagtggagagtgttcctgttgaatcttgcacatatttgaatgtgtaagcattgtatacattgatcaagttcgggggaataaagacagaccacacctaaaactgcctttctgcttctcttaaaggagaagtagctgtgaacattgtctggataccagatatttgaatctttcttactattggtaataaaccttgatggcattgggcaaacagtagacttatagtagggttggggtagcccatgttatgtgactatctttatgagaattttaaagtggttctggatatcttttaacttggagtttcatttcttttcattgtaatcaaaaaaaaaattaacagaagccaaaatacttctgagaccttgtttcaatctttgctgtatatcccctcaaaatccaagttattaatcttatgtgttttctttttaattttttgattggatttctttagatttaatggttcaaatgagttcaactttgagggacgatctttgaatatacttacctattataaaatcttactttgtatttgtatttaaaaaagaaa

SEQ ID NO: 12230 - protein, 925 aa, Homo sapiens
  ref <308>: DATABASE ACCESSION NUMBER: SWISS-Prot / AAF36094
  ref <309>: DATABASE ENTRY DATE: 2002-06-15
MERDGCAGGGSRGGEGGRAPREGPAGNGRDRGRSHAAEAPGDPQAAASLLAPMDVGEEPLEKAARARTAKDPNTYKVLSLVLSVCVLTTILGCIFGLKPSCAKEVKSCKGRCFERTFGNCRCDAACVELGNCCLDYQETCIEPEHIWTCNKFRCGEKRLTRSLCACSDDCKDKGDCCINYSSVCQGEKSWVEEPCESINEPQCPAGFETPPTLLFSLDGFRAEYLHTWGGLLPVISKLKKCGTYTKNMRPVYPTKTFPNHYSIVTGLYPESHGIIDNKMYDPKMNASFSLKSKEKFNPEWYKGEPIWVTAKYQGLKSGTFFWPGSDVEINGIFPDIYKMYNGSVPFEERILAVLQWLQLPKDERPHFYTLYLEEPDSSGHSYGPVSSEVIKALQRVDGMVGMLMDGLKELNLHRCLNLILISDHGMEQGSCKKYIYLNKYLGDVKNIKVIYGPAARLRPSDVPDKYYSFNYEGIARNLSCREPNQHFKPYLKHFLPKRLHFAKSDRIEPLTFYLDPQWQLALNPSERKYCGSGFHGSDNVFSNMQALFVGYGPGFKHGIEADTFENIEVYNLMCDLLNLTPAPNNGTHGSLNHLLKNPVYTPKHPKEVHPLVQCPFTRNPRDNLGCSCNPSILPIEDFQTQFNLTVAEEKIIKHETLPYGRPRVLQKENTICLLSQHQFMSGYSQDILMPLWTSYTVDRNDSFSTEDFSNCLYQDFRIPLSPVHKCSFYKNNTKVSYGFLSPPQLNKNSSGIYSEALLTTNIVPMYQSFQVIWRYFHDTLLRKYAEERNGVNVVSGPVFDFDYDGRCDSLENLRQKRRVIRNQEILIPTHFFIVLTSCKDTSQTPLHCENLDTLAFILPHRTDNSESCVHGKHDSSWVEELLMLHRARITDVEHITGLSFYQQRKEPVSDILKLKTHLPTFSQED

SEQ ID NO: 12231 - DNA, 1611 bp, Rattus norvegicus
  ref <308>: DATABASE ACCESSION NUMBER: EMBL / AF000973
  ref <309>: DATABASE ENTRY DATE: 2002-06-08
atgagtagccgcagccacaatggcagtgtggggcggcctctgggcagtgggcctggattcctgggctgggaacctgtggaccccgaggcaggccgcccccgacagcccacccaaggccccggcctgcagatgatggccaagggtcagcctgctgggctgtcacccagtggccccaggggccactcccaggcgcaggaggaggaagaggaagaggaagacgaggacaggccaggctcagggaagcccccgaccgtcagtcaccgcctgggccaccgtagggccctcttcgagaagcgtaaacgactcagtgactatgcactcatctttggcatgttcgggattgtcgtcatggtgacagaaacagagctgtcctggggtgtgtacaccaaggagtctctgtgctcattcgccctgaaatgcctaatcagcctctccactgtcatcctgcttggccttgtcatcctctaccacgcccgagagatccagctgttcctggtggacaatggtgccgatgactggcgcattgccatgacgtgggagcgagtgtccctgatctcgctggagttggctgtgtgtgccatccacccagtgcctggccactaccgcttcacatggacggcgcggctggccttctccctggtgccgtcagcagccgaggcggatgtggatgtgcttctgtccatccccatgtttctgcgcctctatctgctggctcgggtcatgctcctgcacagccgcatcttcacggacgcatccagtcgcagcatcggagccctgaaccgtgtcaccttcaacacacgctttgtcaccaagacactcatgaccatctgccctggcaccgtgctgttggtcttcagcatctcctcctggatcgtcgctgcatggacagtgcgcgtgtgtgagaggtaccatgataaacaggaagtgaccagcaacttcctgggggccatgtggctcatctccattaccttcctgtccatcggctacggggacatggtgccgcacacctactgtgggaagggcgtgtgtctgctcaccggcatcatgggagcaggctgcactgcactcgtggtggccgtcgtggcccggaagttggaactcaccaaggctgagaaacacgtgcacaacttcatgatggacacacagctcaccaagcgggttaaaaacgccgctgcaaacgttctcagggagacatggctcatctacaaacacaccaggctagtgaagaagccagaccaaagccgggttcggaaacaccagcgtaagttccttcaggccatccatcaggcgcagaagctccggactgtgaagattgaacaagggaaggtgaatgatcaggccaacacgctggctgacctggccaaggcacagagcatcgcatatgaggtggtgtcggagctgcaggcccagcaggaggagttggaggcccgtctggctgccctggagagccgcctggatgtcctaggcgcctccctgcaggccctaccaagtctcatagcccaagccatatgccctctaccaccaccctggcccgggcccagtcacctgaccacagccgcccagagcccacaaagccactggctgcccaccacggcatcagactgtgggtga

SEQ ID NO: 12232 - protein, 536 aa, Rattus norvegicus
  ref <308>: DATABASE ACCESSION NUMBER: SWISS-Prot / AAB82740
  ref <309>: DATABASE ENTRY DATE: 2002-06-15
MSSRSHNGSVGRPLGSGPGFLGWEPVDPEAGRPRQPTQGPGLQMMAKGQPAGLSPSGPRGHSQAQEEEEEEEDEDRPGSGKPPTVSHRLGHRRALFEKRKRLSDYALIFGMFGIVVMVTETELSWGVYTKESLCSFALKCLISLSTVILLGLVILYHAREIQLFLVDNGADDWRIAMTWERVSLISLELAVCAIHPVPGHYRFTWTARLAFSLVPSAAEADVDVLLSIPMFLRLYLLARVMLLHSRIFTDASSRSIGALNRVTFNTRFVTKTLMTICPGTVLLVFSISSWIVAAWTVRVCERYHDKQEVTSNFLGAMWLISITFLSIGYGDMVPHTYCGKGVCLLTGIMGAGCTALVVAVVARKLELTKAEKHVHNFMMDTQLTKRVKNAAANVLRETWLIYKHTRLVKKPDQSRVRKHQRKFLQAIHQAQKLRTVKIEQGKVNDQANTLADLAKAQSIAYEVVSELQAQQEELEARLAALESRLDVLGASLQALPSLIAQAICPLPPPWPGPSHLTTAAQSPQSHWLPTTASDCG

SEQ ID NO: 12233 - DNA, 2527 bp, Homo sapiens
ggtggtctgagctggagccacgctttctgttggagggggcagctgaaggagaacagcaagacatatccggcggccctacggactcggagagctggagggaccccggagatctcaaagggacaggaaaggcagcagcagccaccctctctcccagtcaagtggtcaccagcaggactgaaggggacagcccctttgcagtggctcggcgaggagacccctgcaccctagggtcagtgcaggagcccagccgctgagccatgccgggccccgggcggcctgcagcgagcccaacccctgcacccaggtagtcatgaacagccacagctacaatggcagcgtggggcggccgctgggcagcgggccgggcgccctgggacgagaccctccggaccctgaggccggccaccccccacaacccccgcacagcccgggcctccaggtggtagtggccaagagtgagccagcccggccctcacccggcagcccccgggggcagccccaggaccaggacgatgacgaggatgatgaggaagatgaggccggcaggcagagagcctcggggaaaccctcaaatgtgggccaccgcctgggccaccggcgggcgctcttcgagaagcggaagcgcctcagcgactatgccctcattttcggcatgtttggcatcgtcgtcatggtgacggagaccgagctgtcctggggggtgtacaccaaggagtctctgtactcattcgcactcaaatgcctcatcagcctctccacggccatcctgctgggtctcgttgtcctctaccatgcccgggagatccagctgttcatggtggacaacggggctgatgactggcgcatcgccatgacctgcgagcgcgtgttcctcatctcgctagagctggcagtgtgcgccattcacccggtgcccggccactaccgcttcacgtggacggcgcggctggccttcacgtacgcgccctcggtggccgaggccgacgtggacgtgctgctgtccatccccatgttcctgcgcctctacctgctgggccgggtgatgctactgcacagcaaaatcttcacggacgcctcgagccgcagcatcggggccctcaacaagatcaccttcaacacgcgcttcgtcatgaagacactcatgaccatctgccccggcaccgtgctgctggtcttcagcatctcctcctggatcatcgcagcctggaccgtgcgcgtctgcgagaggtaccacgacaagcaggaagtgaccagcaacttcctgggggccatgtggctgatttccatcaccttcctctccattggctacggcgacatggtgccccacacctactgcgggaagggtgtgtgcctgctcactggcatcatgggagctggctgtaccgcgctcgtggtggctgtggtggctcggaagctggagctcaccaaggctgagaagcacgtgcacaacttcatgatggacactcagctcaccaagcgggtaaaaaacgccgctgctaacgttctcagggagacgtggctcatctacaaacataccaggctggtgaagaagccagaccaagcccgggttcggaaacaccagcgtaagttcctccaagccatccatcaggctcagaagctccggagtgtgaagatcgagcaagggaagctgaacgaccaggctaacacgcttaccgacctagccaagacccagaccgtcatgtacgaccttgtatcggagctgcacgctcagcacgaggagctggaggcccgcctggccaccctggaaagccgcttggatgcgctgggtgcctctctacaggccctgcctggcctcatcgcccaagccatacgcccacccccgcctcccctgcctcccaggcccggccccggcccccaagaccaggcagcccggagctccccctgccggtggacgcccgtggccccctcggactgcgggtgacggccctgcccgccaccagacccctaaatcttggccatcgtgtggccgccacctccgggaagccttgtacagtggcgcctcttggagttcaagaagccaacgctgagtcaggctgagtggactgaggcctgccccgcccagactgcccaggcagagggcagggctggaccatgggtgagggcaggggagcccggagcttcctctggtcacctggtcccccgactctccccaggcccccggtgggcatggagcagcccggggaggggtccgtgctggttctgaataaagcaggacccgcctagtggctgcctgtgtgcatggctggaaggcactggtgatgtcccaggaggtagacctccagccctgggtaccaagatgaatgtgggaatcagaaaaacctgttcccatcaccggcctagcctagaatcctagcctagaagccctctctccctctgggctggagctcagtgagggacaactctctagggacacctgtaccagccccacctggcgctgagatccctcagacagcatggcccagccctggccagaagcatcgctccccttcaaccaaccgcgttgatg

SEQ ID NO: 12234 - protein, 543 aa, Homo sapiens
MNSHSYNGSVGRPLGSGPGALGRDPPDPEAGHPPQPPHSPGLQVVVAKSEPARPSPGSPRGQPQDQDDDEDDEEDEAGRQRASGKPSNVGHRLGHRRALFEKRKRLSDYALIFGMFGIVVMVTETELSWGVYTKESLYSFALKCLISLSTAILLGLVVLYHAREIQLFMVDNGADDWRIAMTCERVFLISLELAVCAIHPVPGHYRFTWTARLAFTYAPSVAEADVDVLLSIPMFLRLYLLGRVMLLHSKIFTDASSRSIGALNKITFNTRFVMKTLMTICPGTVLLVFSISSWIIAAWTVRVCERYHDKQEVTSNFLGAMWLISITFLSIGYGDMVPHTYCGKGVCLLTGIMGAGCTALVVAVVARKLELTKAEKHVHNFMMDTQLTKRVKNAAANVLRETWLIYKHTRLVKKPDQARVRKHQRKFLQAIHQAQKLRSVKIEQGKLNDQANTLTDLAKTQTVMYDLVSELHAQHEELEARLATLESRLDALGASLQALPGLIAQAIRPPPPPLPPRPGPGPQDQAARSSPCRWTPVAPSDCG

SEQ ID NO: 12235 - DNA, 1216 bp, Rattus norvegicus
  ref <308>: DATABASE ACCESSION NUMBER: EMBL / AF009604
  ref <309>: DATABASE ENTRY DATE: 1998-04-28
tatctccagcccaatccagcatacagagctaagctaggaatgctgaacactatgtcgaagctccgagggcaggtgaaggccaccggctacccacagaccgaaggcttgctgggggactgcatgctcaagtacggcagggagcttggagaacactctgcttttggcaactcattggtagaagttggtgaggccctgaaactcatggctgaggtgaaggactctctggatattaatgtgaagcagacttttattgacccactacagctactgcaagacaaagatttaaaagagattgggcaccacctgagaaagctagaaggccgccgtctggactatgattataaaaagaagcgggtgggtaagatccccgaggaagaaatcagacaagcagtagaaaagtttgaagagtcaaaggagttggccgaaagaagcatgtttaattttttagaaaatgacgtagagcaagtgagtcagctggccgtgtttgtagaggcggcgttagactatcacaggcagtccaccgagatcctgcaggagctgcagaacaagctagagctgcgaatagctcttgcatcccaagtccctaggcgagactacatgccaaagcctgtgaacacgagttccaccaatgccaacggggtcgaacccagctcttcgtcaaagttaacaggtactgacattccctcggaccagccctgctgtcgtggtctctatgactttgagccagaaaacgaaggagaattgggatttaaagaaggggacatcattacattaaccaatcagatagatgaaaactggtatgaaggaatgctccgtggggaatccggcttcttccctattaattacgtggaagtcattgtgcctttacctcggtaaatgtgtcttttggacctgacttcagaactgaaatgaattggcaccagtgttctctcagtgtggtgttctgtgacatcctcgctctctggcccacttaatcacttttgtatgtgtgttttctttataatgtattttgtatcaatttaatttgtataactgatttctttgtcctaactcataaaaatagttttcttcttgtttctaaaaagtcattgcttaaatgtatttgcttcctgttgctaagaaaagtaaattgcgcccattcgaatgtcctgggtagtccttagctgcagtgggaacgcgccctttgcggctatgaaagctaaagattttgtttctt

SEQ ID NO: 12236 - protein, 291 aa, Rattus norvegicus
  ref <308>: DATABASE ACCESSION NUMBER: SWISS-Prot / O35180
  ref <309>: DATABASE ENTRY DATE: 2001-10-16
YLQPNPAYRAKLGMLNTMSKLRGQVKATGYPQTEGLLGDCMLKYGRELGEHSAFGNSLVEVGEALKLMAEVKDSLDINVKQTFIDPLQLLQDKDLKEIGHHLRKLEGRRLDYDYKKKRVGKIPEEEIRQAVEKFEESKELAERSMFNFLENDVEQVSQLAVFVEAALDYHRQSTEILQELQNKLELRIALASQVPRRDYMPKPVNTSSTNANGVEPSSSSKLTGTDIPSDQPCCRGLYDFEPENEGELGFKEGDIITLTNQIDENWYEGMLRGESGFFPINYVEVIVPLPR

SEQ ID NO: 12237 - DNA, 1500 bp, Homo sapiens
  ref <308>: DATABASE ACCESSION NUMBER: EMBL / X99664
  ref <309>: DATABASE ENTRY DATE: 1997-05-13
atgtcggtggccgggctgaagaagcagttccacaaagccagccagctatttagtgaaaaaataagtggtgctgaaggaactaaactagacgatgaatttcttgacatggaaaggaaaatagatgttaccaataaagttgttgcagaaattctttcaaaaaccactgaatatcttcagccaaatccagcatacagagctaagctaggaatgctgaacactgtgtcgaagatccgagggcaggtgaagaccacaggatacccgcagacggaaggcttgctgggggactgtatgctgaaatacgggaaggagctcggggaagactccacctttggcaatgcattgatagaagttggtgaatccatgaagctaatggctgaggtgaaagactctcttgatattaatgtaaagcaaacttttattgacccacttcagttactacaagataaagatttaaaagagatcgggcatcacctgaaaaagctggaaggccgccgcctggattacgattataaaaagaaacgagtaggtaagataccagacgaagaagtcagacaagcggtagaaaaatttgaagagtcaaaggagttggctgaaagaagcatgtttaactttttagaaaatgatgtagaacaagtcagccagttggctgtgttcatagaggcagcattagactatcacagacagtccacagagattctgcaggagctgcagagcaagctacagatgcgaatatcagctgcatccagtgtccccagacgagaatacaagccaaggcctgtgaaaaggagttctagtgagctcaatggagtttccaccacctctgtagtgaagacgacaggttctaacattcccatggaccagccctgctgtcgtggtctctatgactttgagccagaaaaccaaggagaattaggatttaaagaaggggacatcattacattaaccaatcaaatagatgaaaactggtatgaaggaatgatacacggagaatcgggattcttccccattaattacgtggaagtgatcgtgcctttacctcagtaaatgtgtaacacaaactctggacatactttcgtaactgaaatgaattcacaccagtgtgctctcagtgcggtgttctgtgacatcctttgctctctgaccaacttaatgacttttgtatgtgtgctctctttataatgtattttatatcactttaatttgtataaatgattttcttgtccgtgctacatgaaaatattgttttcttttttgcttcctgtcctaaaagtcattggttaaatgtatttgcttcctgtggctaaaaataagtctcacccattgcagttatgtcaacgaatggcctatattcctcagctgcaatgaaatggtaacatttgaaactaagaaatgctaaatattttgtttctcgacattcctgatgacgtctggtcttttcttttcattgtattttaagcttacctgtgaatagcccaataaacatgacacaactgtgttggc

SEQ ID NO: 12238 - protein, 347 aa, Homo sapiens
  ref <308>: DATABASE ACCESSION NUMBER: SWISS-Prot / Q99963
  ref <309>: DATABASE ENTRY DATE: 2001-10-16
MSVAGLKKQFHKASQLFSEKISGAEGTKLDDEFLDMERKIDVTNKVVAEILSKTTEYLQPNPAYRAKLGMLNTVSKIRGQVKTTGYPQTEGLLGDCMLKYGKELGEDSTFGNALIEVGESMKLMAEVKDSLDINVKQTFIDPLQLLQDKDLKEIGHHLKKLEGRRLDYDYKKKRVGKIPDEEVRQAVEKFEESKELAERSMFNFLENDVEQVSQLAVFIEAALDYHRQSTEILQELQSKLQMRISAASSVPRREYKPRPVKRSSSELNGVSTTSVVKTTGSNIPMDQPCCRGLYDFEPENQGELGFKEGDIITLTNQIDENWYEGMIHGESGFFPINYVEVIVPLPQ

SEQ ID NO: 12239 - DNA, 2046 bp, Rattus norvegicus
  ref <308>: DATABASE ACCESSION NUMBER: EMBL / AF015911
  ref <309>: DATABASE ENTRY DATE: 1997-09-11
cgccgcggcggccgcagaggcggaggccgaggccgaggcgcaggggggcgcgccccgggcccaggcccggccccagctgccgctgcggagcccgccgggaggccccggagcgcggccacagcgcagctgctgccatggcgcagaccctgcagatggagattccaaactttggcaacagcatcctcgagtgcctcaatgagcagcggctacagggactgtattgtgacgtgtcagtggtggtaaagggccatgccttcaaagcccaccgtgctgtgttggccgccagcagctcctacttccgggacctattcaacagcagccgcagtgctgtggtagaactgccagccgctgtgcagccacagtcattccagcagatcctcacgttttgttatacaggccggctgagcatgaacatgggggaccagttcctgctcatctacacagccggcttcctgcagatccaggagatcatggagaaaggcactgagttcttcctcaaagttagctctccaagttgcgactcccagggcctgcacccggaggaggccccatcctcagagcctcagagtcctgtagcgcagatattgggctggccagcctgtagcacgccactgccccttgtgtcacgggtcaagacagaacaggagttggactcggtgcaatgcacacccatggccaagaggctatgggatagcagccagaaggaagctggaggcagtggtggcaacaatggcagccgcaagatggccaagttctccacgccagacctggcccctaaccggatgccccagccagtctctgtggccacagctacagcagcagtggctgtggttgcagtggggggatgtgtgagtgggcccagcatgtcagagcggaccagcccaggtacctccagtgcttacactagtgacagccccagctcctaccacaacgaagaagacgaagaggaagatgcaggtgaggagggcacagatgagcagtaccgtcagatctgcaatatgtataccatgtacagtatgttgaacgttggccagacagttgagaaggtggaggctcttcctgagcaggtcgtccttgagtcccacagtcgcattcgagtgcggcaagacctggcatctctcccagctgagctcatcaaccagatcggcaatcgctgccacccaaagctctacgatgaaggcgacccctcagagaagctggagcttgtgacaggcaccaatgtatacatcacaagggcacaactcatgaactgccacgtcagtgcaggcacgcggcacaaggtcttgctgcggcggctcctggcttccttctttgaccggaacacactggccaatagctgtggcaccggcatccgttcttccaccaatgaccctagacgcaagccactggacagtcgtgtcctccatgctgtcaagtactactgccagaacttcgcccccaacttcaaggagagcgagatgaatgccattgcagccgacatgtgcaccaatgcccgccgagtggtccgtaaaagctggctgcccaagaccaagccgctacacctggtggagggcgataactacagcagcttcatcagcgacactggcaagatagaaccggacatgatgagcatggaacacagcttcgagacagccagccacgatggcgaggctggcccttcagctgaggttctccagtaacatacatgtgacacccccttaccggatgtcacattccccctcctatcacacccccacctaccacctacctggtcacgatctactgtctgtccctccccagaacctgtgagggggtgttcagtgccctctatcggatgcaagagctggctgaccaaggccaaagcactgtacctagcagagggcagtgccgacagcagctttctcaatgaccatgaggaagagctgaacttggtaggcatagaatacagcttccacacagacagccccctcagcagaggtcctccagtacctgcccaggaccctcccatggatgtcacactcccctcctgtcacacacatacccccaccttagtcacgagctactgtg

SEQ ID NO: 12240 - protein, 514 aa, Rattus norvegicus
  ref <308>: DATABASE ACCESSION NUMBER: SWISS-Prot / AAB69864
  ref <309>: DATABASE ENTRY DATE: 2001-12-01
MAQTLQMEIPNFGNSILECLNEQRLQGLYCDVSVVVKGHAFKAHRAVLAASSSYFRDLFNSSRSAVVELPAAVQPQSFQQILTFCYTGRLSMNMGDQFLLIYTAGFLQIQEIMEKGTEFFLKVSSPSCDSQGLHPEEAPSSEPQSPVAQILGWPACSTPLPLVSRVKTEQELDSVQCTPMAKRLWDSSQKEAGGSGGNNGSRKMAKFSTPDLAPNRMPQPVSVATATAAVAVVAVGGCVSGPSMSERTSPGTSSAYTSDSPSSYHNEEDEEEDAGEEGTDEQYRQICNMYTMYSMLNVGQTVEKVEALPEQVVLESHSRIRVRQDLASLPAELINQIGNRCHPKLYDEGDPSEKLELVTGTNVYITRAQLMNCHVSAGTRHKVLLRRLLASFFDRNTLANSCGTGIRSSTNDPRRKPLDSRVLHAVKYYCQNFAPNFKESEMNAIAADMCTNARRVVRKSWLPKTKPLHLVEGDNYSSFISDTGKIEPDMMSMEHSFETASHDGEAGPSAEVLQ

SEQ ID NO: 12241 - DNA, 1804 bp, Homo sapiens
  ref <308>: DATABASE ACCESSION NUMBER: EMBL / AF395817
  ref <309>: DATABASE ENTRY DATE: 2001-08-06
aggccgcggaggcggaggccgaggccccggcgcagcggggcgcgccccgggcccaggcccggccccagccgccgctgcggagcccgccgggaccccccggagcgcggccacggcgcagccgctgccatggcccagacactgcagatggagatcccgaacttcggcaacagcatcctggagtgcctcaatgaacagcggctgcagggcctgtactgtgacgtgtcagtggtggtcaagggccatgccttcaaggcccaccgggccgtgcttgctgccagcagctcctacttccgggacctgttcaacaacagccgcagcgccgtggtggagctgccggcggctgtgcagccccagtctttccagcagatcctcagcttctgctacacgggccggctgagcatgaacgtgggcgaccagttcctgctcatgtacacggctggcttcctgcagatccaggagatcatggagaagggcaccgagttcttcctcaaggtgagctccccgagctgcgactcccagggcctgcatgcggaggaggccccatcgtcggagccccagagccccgtggcgcagacatcgggctggccagcctgtagcaccccgctgcccctcgtgtcgcgggtgaagacggagcagcaggagtcggactccgtgcagtgcatgcccgtggccaagcggctgtgggacagtggccagaaggaggctgggggcggcggcaatggcagccgcaagatggccaagttctccacgccggacctggctgccaaccggcctcaccagcccccgccaccccaacaggctccggtggtggcagcagcccagcccgccgtggctgcgggagcagggcagccagccggtggggtggcagcagcagggggtgtggtgagtgggcccagcacgtcggagcggaccagcccaggcacctcaagcgcctacaccagcgacagccctggctcctaccacaatgaggaggacgaggaggaggatggtggcgaggagggcatggatgagcagtaccggcagatctgcaacatgtacaccatgtacagcatgatgaacgtcggccagacagccgagaaggtggaggccctcccggagcaggtagcccccgagtcccgaaatcgcatccgggttcggcaagacctggcgtctctcccggctgaacttatcaaccagattgggaaccgctgccaccccaagctctacgacgagggcgacccctctgagaagctggagctggtgacaggcaccaacgtgtacatcacaagggcgcagctgatgaactgccacgtcagcgcaggcacgcggcacaaggtcctactgcggcggctcctggcctccttctttgaccggaacacgctggccaacagctgcggcaccggcatccgctcttctaccaacgatccccgtcggaagcccctggacagccgcgtgctccacgctgtcaagtactactgccagaacttcgcccccaacttcaaggagagcgagatgaatgccatcgcggccgacatgtgcaccaacgcccgccgcgtcgtgcgcaagagctggatgcccaaggtcaaggtgctcaaggctgaggatgacgcctacaccaccttcatcagtgaaacgggcaagatcgagccggacatgatgggtgtggagcatggcttcgagaccgccagccacgagggcgaggcgggtccctcggctgaagccctgcagtaacccgcccagcctcccgcggggccacacacttcccctcccaacacacacacacacctgccatcttggtcatgagctactgtctgtccctccccag

SEQ ID NO: 12242 - protein, 527 aa, Homo sapiens
  ref <308>: DATABASE ACCESSION NUMBER: SWISS-Prot / AAK83885
  ref <309>: DATABASE ENTRY DATE: 2003-02-01
MAQTLQMEIPNFGNSILECLNEQRLQGLYCDVSVVVKGHAFKAHRAVLAASSSYFRDLFNNSRSAVVELPAAVQPQSFQQILSFCYTGRLSMNVGDQFLLMYTAGFLQIQEIMEKGTEFFLKVSSPSCDSQGLHAEEAPSSEPQSPVAQTSGWPACSTPLPLVSRVKTEQQESDSVQCMPVAKRLWDSGQKEAGGGGNGSRKMAKFSTPDLAANRPHQPPPPQQAPVVAAAQPAVAAGAGQPAGGVAAAGGVVSGPSTSERTSPGTSSAYTSDSPGSYHNEEDEEEDGGEEGMDEQYRQICNMYTMYSMMNVGQTAEKVEALPEQVAPESRNRIRVRQDLASLPAELINQIGNRCHPKLYDEGDPSEKLELVTGTNVYITRAQLMNCHVSAGTRHKVLLRRLLASFFDRNTLANSCGTGIRSSTNDPRRKPLDSRVLHAVKYYCQNFAPNFKESEMNAIAADMCTNARRVVRKSWMPKVKVLKAEDDAYTTFISETGKIEPDMMGVEHGFETASHEGEAGPSAEALQ

SEQ ID NO: 12243 - DNA, 768 bp, Rattus norvegicus
  ref <308>: DATABASE ACCESSION NUMBER: EMBL / AF016247
  ref <309>: DATABASE ENTRY DATE: 2000-03-03
gatagtaatgccacagaagttatgccaacctcatgtttatggctacccagattacctctgggatgaagtacctttcatccctcaactgtgtccaccgagatctggccacacgcaactgcttagtgggcaagaactacaccatcatgatagctgactttggtatgagcagaaacctgtacagtggtgactactaccggatccagggccggacagtgctccccatccgccggatgtcctgggagagcatcttgctggacaaattcaccacggcaatgatgtgtgggggctttggggtgactctgtgggagacttgcacctcgcgccaggagcagccctcttcccagctgtcggacgagcaggttattgagaatactggagagttcttccgagaccaggggaggcagacctatctccctcaaccagccgcttgccccgattctgtgtataagctgatgctcagatgctggagaagagaaaccaagcaccgaccatccttccaaggaaatacaaccttctgcttccttcaagcgaggagctgagtgataccatcggtaccctggcagtgttcctgtggcccagatcctccccacaagacctaccgctcagccacatctaagccactccagctggacagtcaatggacccgagagacagagaattagtcactctgccctctctgttcctcacctcctccactgcacttccctgttccctaccattgactcatatatacttttttttacatgaaataaccaaaaaaaaaaaaaa

SEQ ID NO: 12244 - protein, 168 aa, Rattus norvegicus
  ref <308>: DATABASE ACCESSION NUMBER: SWISS-Prot / AAD01584
  ref <309>: DATABASE ENTRY DATE: 2003-02-01
MFMATQITSGMKYLSSLNCVHRDLATRNCLVGKNYTIMIADFGMSRNLYSGDYYRIQGRTVLPIRRMSWESILLDKFTTAMMCGGFGVTLWETCTSRQEQPSSQLSDEQVIENTGEFFRDQGRQTYLPQPAACPDSVYKLMLRCWRRETKHRPSFQGNTTFCFLQARS

SEQ ID NO: 12245 - DNA, 3096 bp, Homo sapiens
  ref <308>: DATABASE ACCESSION NUMBER: EMBL / X74764
  ref <309>: DATABASE ENTRY DATE: 1993-11-30
catcttgcatcagcctgtggatgtatgcctaccaccgggctccttcaccagcaaagtggaaaaagaagcgtttcacaacaaattcttctttttgggttggggaaacgcagtggattatagctctgttttcttctttccaaaactgtgcacccctggatgaaacctccatcaagggagacctacaagttgcctggggttcagtgctctagaaagttccaaggtttgtggcttgaattattctaaagaagctgaaataattgaagagaagcagaggccagctgtttttgaggatcctgctccacagagaatgctctgcacccgttgatactccagttccaacaccatcttctgagatgatcctgattcccagaatgctcttggtgctgttcctgctgctgcctatcttgagttctgcaaaagctcaggttaatccagctatatgccgctatcctctgggcatgtcaggaggccagattccagatgaggacatcacagcttccagtcagtggtcagagtccacagctgccaaatatggaaggctggactcagaagaaggggatggagcctggtgccctgagattccagtggaacctgatgacctgaaggagtttctgcagattgacttgcacaccctccattttatcactctggtggggacccaggggcgccatgcaggaggtcatggcatcgagtttgcccccatgtacaagatcaattacagtcgggatggcactcgctggatctcttggcggaaccgtcatgggaaacaggtgctggatggaaatagtaacccctatgacattttcctaaaggacttggagccgcccattgtagccagatttgtccggttcattccagtcaccgaccactccatgaatgtgtgtatgagagtggagctttacggctgtgtctggctagatggcttggtgtcttacaatgctccagctgggcagcagtttgtactccctggaggttccatcatttatctgaatgattctgtctatgatggagctgttggatacagcatgacagaagggctaggccaattgaccgatggtgtgtctggcctggacgatttcacccagacccatgaataccacgtgtggcccggctatgactatgtgggctggcggaacgagagtgccaccaatggctacattgagatcatgtttgaatttgaccgcatcaggaatttcactaccatgaaggtccactgcaacaacatgtttgctaaaggtgtgaagatctttaaggaggtacagtgctacttccgctctgaagccagtgagtgggaacctaatgccatttccttcccccttgtcctggatgacgtcaaccccagtgctcggtttgtcacggtgcctctccaccaccgaatggccagtgccatcaagtgtcaataccattttgcagatacctggatgatgttcagtgagatcaccttccaatcagatgctgcaatgtacaacaactctgaagccctgcccacctctcctatggcacccacaacctatgatccaatgcttaaagttgatgacagcaacactcggatcctgattggctgcttggtggccatcatctttatcctcctggccatcattgtcatcatcctctggaggcagttctggcagaaaatgctggagaaggcttctcggaggatgctggatgatgaaatgacagtcagcctttccctgccaagtgattctagcatgttcaacaataaccgctcctcatcacctagtgaacaagggtccaactcgacttacgatcgcatctttccccttcgccctgactaccaggagccatccaggctgatacgaaaactcccagaatttgctccaggggaggaggagtcaggctgcagcggtgttgtgaagccagtccagcccagtggccctgagggggtgccccactatgcagaggctgacatagtgaacctccaaggagtgacaggaggcaacacatactcagtgcctgccgtcaccatggacctgctctcaggaaaagatgtggctgtggaggagttccccaggaaactcctaactttcaaagagaagctgggagaaggacagtttggggaggttcatctctgtgaagtggagggaatggaaaaattcaaagacaaagattttgccctagatgtcagtgccaaccagcctgtcctggtggctgtgaaaatgctccgagcagatgccaacaagaatgccaggaatgattttcttaaggagataaagatcatgtctcggctcaaggacccaaacatcatccatctattatctgtgtgtatcactgatgaccctctctgtatgatcactgaatacatggagaatggagatctcaatcagtttctttcccgccacgagccccctaattcttcctccagcgatgtacgcactgtcagttacaccaatctgaagtttatggctacccaaattgcctctggcatgaagtacctttcctctcttaattttgttcaccgagatctggccacacgaaactgtttagtgggtaagaactacacaatcaagatagctgactttggaatgagcaggaacctgtacagtggtgactattaccggatccagggccgggcagtgctccctatccgctggatgtcttgggagagtatcttgctgggcaagttcactacagcaagtgatgtgtgggcctttggggttactttgtgggagactttcaccttttgtcaagaacagccctattcccagctgtcagatgaacaggttattgagaatactggagagttcttccgagaccaagggaggcagacttacctccctcaaccagccatttgtcctgactctgtgtataagctgatgctcagctgctggagaagagatacgaagaaccgtccctcattccaagaaatccaccttctgctccttcaacaaggcgacgagtgatgctgtcagtgcctggccatgttcctacggctcaggtcctccctacaagacctaccactcacccatgcctatgccactccatctggacatttaatgaaactgagagacagaggcttgtttgctttgccctcttttcctggtcacccccactccctacccctgactcatatatact

SEQ ID NO: 12246 - protein, 855 aa, Homo sapiens
  ref <308>: DATABASE ACCESSION NUMBER: SWISS-Prot / CAA52777
  ref <309>: DATABASE ENTRY DATE: 2002-06-15
MILIPRMLLVLFLLLPILSSAKAQVNPAICRYPLGMSGGQIPDEDITASSQWSESTAAKYGRLDSEEGDGAWCPEIPVEPDDLKEFLQIDLHTLHFITLVGTQGRHAGGHGIEFAPMYKINYSRDGTRWISWRNRHGKQVLDGNSNPYDIFLKDLEPPIVARFVRFIPVTDHSMNVCMRVELYGCVWLDGLVSYNAPAGQQFVLPGGSIIYLNDSVYDGAVGYSMTEGLGQLTDGVSGLDDFTQTHEYHVWPGYDYVGWRNESATNGYIEIMFEFDRIRNFTTMKVHCNNMFAKGVKIFKEVQCYFRSEASEWEPNAISFPLVLDDVNPSARFVTVPLHHRMASAIKCQYHFADTWMMFSEITFQSDAAMYNNSEALPTSPMAPTTYDPMLKVDDSNTRILIGCLVAIIFILLAIIVIILWRQFWQKMLEKASRRMLDDEMTVSLSLPSDSSMFNNNRSSSPSEQGSNSTYDRIFPLRPDYQEPSRLIRKLPEFAPGEEESGCSGVVKPVQPSGPEGVPHYAEADIVNLQGVTGGNTYSVPAVTMDLLSGKDVAVEEFPRKLLTFKEKLGEGQFGEVHLCEVEGMEKFKDKDFALDVSANQPVLVAVKMLRADANKNARNDFLKEIKIMSRLKDPNIIHLLSVCITDDPLCMITEYMENGDLNQFLSRHEPPNSSSSDVRTVSYTNLKFMATQIASGMKYLSSLNFVHRDLATRNCLVGKNYTIKIADFGMSRNLYSGDYYRIQGRAVLPIRWMSWESILLGKFTTASDVWAFGVTLWETFTFCQEQPYSQLSDEQVIENTGEFFRDQGRQTYLPQPAICPDSVYKLMLSCWRRDTKNRPSFQEIHLLLLQQGDE

SEQ ID NO: 12247 - DNA, 768 bp, Rattus norvegicus; identical to SEQ ID NO: 12243
  ref <308>: DATABASE ACCESSION NUMBER: EMBL / AF016247
  ref <309>: DATABASE ENTRY DATE: 2000-03-03

SEQ ID NO: 12248 - protein, 168 aa, Rattus norvegicus; identical to SEQ ID NO: 12244
  ref <308>: DATABASE ACCESSION NUMBER: SWISS-Prot / AAD01584
  ref <309>: DATABASE ENTRY DATE: 2003-02-01

SEQ ID NO: 12249 - DNA, 3096 bp, Homo sapiens; identical to SEQ ID NO: 12245
  ref <308>: DATABASE ACCESSION NUMBER: EMBL / X74764
  ref <309>: DATABASE ENTRY DATE: 1993-11-30

SEQ ID NO: 12250 - protein, 855 aa, Homo sapiens; identical to SEQ ID NO: 12246
  ref <308>: DATABASE ACCESSION NUMBER: SWISS-Prot / CAA52777
  ref <309>: DATABASE ENTRY DATE: 2002-06-15

SEQ ID NO: 12251 - DNA, 4158 bp, Rattus norvegicus
  ref <308>: DATABASE ACCESSION NUMBER: EMBL / AF024712
  ref <309>: DATABASE ENTRY DATE: 2000-03-03
aatggacctggagcgtccttctgaggctggtttagttattggctttttttttcttttttctttttaatcaagaacattctaagaacccacaaacgggaagcccctttccccaataacgtttggacacacacttgtgttcactttggttgtttgtgggaattttgtagaaccactgagagtcatggggatccgctcccacacacccacaacgctataaaactccacagagaggaacaaagacccaacctctacaagttctccaaacacggaggatggggtccgtggtgccgcgcatcttcttctttttgctgctggtgacctcgccctggccccaactcaggtccacgccagtgagtgtggggtggaaagtgaagcgcttctgcgggaaggaggaagggcgctgaccagagatagcactgggaaagctacatcttggtcatcgcccaaccctccctcccctcctagaattgggccagcccctcccaggcttccttctgcaacccttgtcgggagccccacaccctagctctcctcccagagggtccacctgtccccaggtccacctgggttcaggctcacactccctgcggtatttcaccaccaccttgtacgatcctggctaccgcaaacctcggttcaccgtcgtgggctacgtggacaacacacagatcgtgaacttcgacagcgacttggcgagtcagcgggtggagccgcgggtgccgtttatagcgcaggatcctgagcatttggaggagctgacacgcctaggcagggggatcttaatacttggccgaatcgaactgtggaccctgttcggttaccatagccagagagagaatggtaagtgaccccatactcagaaggctagtctacagtctccgcatattcctatggaatatataccctgagttggtgaaatctgcaagttcctgccagcctggagatgcctgcaaaaatttactgtggtttcatttcagtttgaaataggctttgaccaatcacgcgcaggctatgtgcaatgagcgggactaacctaggacacggtgttgacctctttggcttcaacagagtctcacactgtccagtggctattcggctgtgacatagggccagaccgtcgcctcctccgtgggtataagcacgttgcttatgaaggccaggattacatctctctaaccgaggacctgcgctcctgggttgcggtggataccgaggaggctcagatcaccaggcgcaagtgggaggcatctggtattgctacatcatggaggtctttcttggagggcaggtgcgttgaagtggcttctcaaatacctggataaagggaaggagatgctgcagcgtgcaggtatgaggggtagcttctattgacccttgagcagagtttatgggaaggaaagagaatgggaccaattcctaagccacctgttgtgaaatactgtcccccccccctccaccccccaccctgccaggctgataatgtttcaaaatcagaatagctgtgattaccctcactggggattcaggattggtgtgtgtgtgtgtgcgtgtgcgtgtgtgtgtgtgtgtgtgtgtgtgtgtgtgtgtgtgtgtgagaattgatgaagtccgtggtggcacactctagtacgggagcttttgtgagctgtcatacatactggatgggcttttcggtgttgtaggcgctatgagtactaagtagctcctcactcgggcctgtaagtaaccttcaataaatgtattgatggacttggatggaaatccttcatttggtctgtggttgaagtcctttctggcctggatagatatctatcatcactctccagagaaagcaataagccgctttacacctcagaccaaaccactctacacagcaggcccaaaatgggctagggaggatcagtttcatggttcctgggatgtaaaatgtgaaattgaagccaaaccatccacggtgggaattactcgtgtggctctgctttctctgtgtggtgtggaatggcggctgagggttgcactgtggcatgggggacagggctcacatccgggactgctccatcctaaggcgtatggatacctatgccgggaaggatctgtcccgacactgacaccaatttctgaaacaaccctgtggggcaggattctaagcagacagtggcagcacttatgtgcccttccctatggacggttgagacttgcaactagggctgagccatcttcccagaaagaccttgcccacctaagggaggaattacaatgggaagaaggtgtccaagtgctcccccccccttttttttcttttctaacttcaaattggagtgaaaatcggaaagggggaacgtcagaattgaggtgctggcttaccacttgttatgactgggttggtggtggtgaaggaaggcataagggaaagagtagaaattagatctgctcccggaatccaaaaggctttcatgccgtggggatagatgcagctgggatctgagtgatgtagaagtggagaaattgagtgctgtcactgctcattcctgtgcagtctaaggcaaaacgaaagaatcattgggtcagcaagacgtttggtgctcgccatagagcctgacaacctgagcctggaaccctgagcacacatggcagaaggagagaacagttgtcttttgaccttcagatatgtgctacacatgtataggtacacacacacacacacacacaggatctcccagtaaccaactctcttcagctaccgcatccccttaaatattccactaggagtcatcaccatcaccagatacaaagcatcaaacacctgaacccatggggggaacattttacattcaaagcacggtagtgactccatctttttctgggatggaaggggcaccaactctgaagagtgggtgccagttccactttgatctcaccccgtttctgccaatgttcacagatcaggaatagttccaaggaataggtatttctacctcctaagtccatgctgttttaagagatgctttctaaattttcaacccaactacggggatgatcacatgaccaatgctcaaatggttcacaggaaaaaacaagttgttctcctctgatctcctcagatccccccaaaacaaacgtggctcatcaccctagacctgaaggtgatgtcaccctgaggtgctgggccctggacttctaccctgctgacatcatcctgacttggcaaagggatgaggaggacctgacccaggacatggaccttgtagagaccagacctacagggaatggaactttccagaagtgggcatctgtggtggtgccttcaggagaagagcatagatacacatgccatgtgctgcatgaggggctgcttgagcccctcatcctgagatggggtaaaaggtagtgtgtgggcacacagtctgtaccctggggaaagcaggagcccttctgcagaacttgagcatgtccttcacttctatcctccctcaccctctctctcccagaaagaccttttaccccccccaactccatcatggggacattctctggtctggttctccttggaagtttggtcactggacctgtgctgccattatgaggaggaggaagagtgcaggtaaggatggtgtttgagatttgggtcttactgagaaatttcaagccctggaaaccaaatgtgccatcttctgtttttgttactataaagtgtatccatttgtgtgttttagctacatggagactgtttttaaactaactctgtaaggaacacctggaaatagaggacagggatttcaagttgaggattctggtgatgtggacacaaatctgaggcagagtctccaggaggaggaaacaggtctctgggagggcactccacttttttttcctgtacaaatcctttcctcacgtttcctgacctagttccaggtctgtctgtaccatactcatggaatatttattgcctgaggtctaggactaggagtttcctctagaaccaaatcattctgcacccctttctccacctttatcctcacagagatggaaaaggaagttaacttaatcatttttatcattttatttccaccccttgacgtcaagtcacagccaacactgaaagtctagaaaggaaacagagacctagtccctccatcattcagttaaacatgcctgcag

SEQ ID NO: 12252 - protein, 335 aa, Rattus norvegicus
  ref <308>: DATABASE ACCESSION NUMBER: SWISS-Prot / AAD05124
  ref <309>: DATABASE ENTRY DATE: 2003-02-01
MGAPFSLSSYQKKLSRAWALNQVGAGIHSLQFFATAVTQPSSREHSFIFVGFVDDTQFLCNNNQGESQRMEPRALRVKNMGPEYWERQTRMVKDISKNSLVKLREAMSVYNHSEDGTHVFQCVSGCDVGPDGLFLRGHEQHAYDGRDYLALNKDLHSWTAGDTAAQITRRKWEEAGVAEQRRTYLKGECVESLRTYLEIGKETLLGADPPKAHVTHHPSPEGDNTLRCWALGFYPSDITLTWQRDGEDLTQDMELVETRPGGDGTFQKWAAVVVPSGEEHRYTCCVEHEGLTEPLLLKWDPSKHTIPIMGITAGLVFLGVAFTGAVVAIAMRKQR

SEQ ID NO: 12253 - DNA, 1301 bp, Homo sapiens
  ref <308>: DATABASE ACCESSION NUMBER: EMBL / X17273
  ref <309>: DATABASE ENTRY DATE: 1995-03-22
caaggatggtggtcatggcgccccgaaccctcttcctgctgctctcgggggccctgaccctgaccgagacctgggcgggctcccactccatgaggtatttcagcgccgccgtgtcccggcccggccgcggggagccccgcttcatcgccatgggctacgtggacgacacgcagttcgtgcggttcgacagcgactcggcgtgtccgaggatggagccgcgggcgccgtgggtggagcaggaggggccggagtattgggaagaggagacacggaacaccaaggcccacgcacagactgacagaatgaacctgcagaccctgcgcggctactacaaccagagcgaggccagttctcacaccctccagtggatgattggctgcgacctggggtccgacggacgcctcctccgcgggtatgaacagtatgcctacgatggcaaggattacctcgccctgaacgaggacctgcgctcctggaccgcagcggacactgcggctcagatctccaagcgcaagtgtgaggcggccaatgtggctgaacaaaggagagcctacctggagggcacgtgcgtggagtggctccacagatacctggagaacgggaaggagatgctgcagcgcgcggacccccccaagacacacgtgacccaccaccctgtctttgactatgaggccaccctgaggtgctgggccctgggcttctaccctgcggagatcatactgacctggcagcgggatggggaggaccagacccaggacgtggagctcgtggagaccaggcctgcaggggatggaaccttccagaagtgggcagctgtggtggtgccttctggagaggagcagagatacacgtgccatgtgcagcatgaggggctgccggagcccctcatgctgagatggaagcagtcttccctgcccaccatccccatcatgggtatcgttgctggcctggttgtccttgcagctgtagtcactggagctgcggtcgctgctgtgctgtggagaaagaagagctcagattgaaaaggagggagctactctcaggctgcaatgtgaaacagctgccctgtgtgggactgagtggcaagtccctttgtgacttcaagaaccctgacttctctttgtgcagagaccagcccacccctgtgcccaccatgaccctcttcctcatgctgaactgcattccttccccaatcacctttcctgttccagaaaaggggctgggatgtctccgtctctgtctcaaatttgtggtccactgagctataacttacttctgtattaaaattagaatctgagtat

SEQ ID NO: 12254 - protein, 338 aa, Homo sapiens
  ref <308>: DATABASE ACCESSION NUMBER: SWISS-Prot / P17693
  ref <309>: DATABASE ENTRY DATE: 2002-06-15
MVVMAPRTLFLLLSGALTLTETWAGSHSMRYFSAAVSRPGRGEPRFIAMGYVDDTQFVRFDSDSACPRMEPRAPWVEQEGPEYWEEETRNTKAHAQTDRMNLQTLRGYYNQSEASSHTLQWMIGCDLGSDGRLLRGYEQYAYDGKDYLALNEDLRSWTAADTAAQISKRKCEAANVAEQRRAYLEGTCVEWLHRYLENGKEMLQRADPPKTHVTHHPVFDYEATLRCWALGFYPAEIILTWQRDGEDQTQDVELVETRPAGDGTFQKWAAVVVPSGEEQRYTCHVQHEGLPEPLMLRWKQSSLPTIPIMGIVAGLVVLAAVVTGAAVAAVLWRKKSSD

SEQ ID NO: 12255 - DNA, 1110 bp, Rattus norvegicus
  ref <308>: DATABASE ACCESSION NUMBER: EMBL / AF029357
  ref <309>: DATABASE ENTRY DATE: 2000-03-03
cccctgcagccacagacagacggttcgcctctccgtaacaggcagctcaccatgcagacccttagaaaggaaaactgcagctcagtgtccgagttcatcctcctgggcttctccagcgaatcccagatcagaatggccctgtttatcttttttcttcttctctacatggtcaccctcctgggcaacggactcatcgtcgctctgatttacctagactctcgcctccacacgcccatgtacttctttctcagcatcctctctttggtagacatgagctacgtcactaccactgtgccccagatgctggttaacatggtgtgtccaaaaaggaccatctcctggggtgcttgtgtagcccagatgttcatcttcctggtcctgggtattgccgagtgtgttctctacgccatcatggcctatgacaggtacatcgccatctgcttcccccttcactattctgtactcatgagccgtcttgtgtgtgccaagatggttacaatatgctcctccatcagcgtcacgggcgctctgatctacactgtcttcaccatgcgtctgccctactgtggtccctacaagatcaaccacttcttctgtgaggtccccgctgtcctgaagttggcctgtgcagacacatccttcaatgaccgcttggacttcatcctgggtttcgtcttacttttggtccctctctccctcatcctggcctcttatgcctgcatctttgtctccatcttaagaatccgctcatcccaggggagactcaagtccttctccacatgtgcctcccacatcactgtggtcaccatgttctatgggccagccatggtcatgtacatgaggcctggttcttggtatgacccagagcgggacaagaagctggctctgttctacaacgttgtctctgctttcctcaaccccatcatctacagcctccggaataaggatgtgaagggcgcttttatgaaagtactcggaggcagagggacagcccagtgagccagaactgtatgactggatggagctcttttggcttactaaagacatcagttctgaataactcgagttttcctggagctctaagcagccaggagaggttgtggcacccct

SEQ ID NO: 12256 - protein, 316 aa, Rattus norvegicus
  misc_feature (1)..(316): Xaa=Unknown amino acid
MQTLRKENCSSVSEFILLGFSSESQIRMALFIFFLLLYMVTLLGNGLIVALIYLDSRLHTPMYFFLSILSLVDMSYVTTTVPQMLVNMVCPKRTISWGACVAQMFIFLVLGIAECVLYAIMAYDRYIAICFPLHYSVLMSRLVCAKMVTICSSISVTGALIYTVFTMRLPYCGPYKINHFFCEVPAVLKLACADTSFNDRLDFILGFVLLLVPLSLILASYACIFVSILRIRSSQGRLKSFSTCASHITVVTMFYGPAMVMYMRPGSWYDPERDKKLALFYNVVSAFLNPIIYSLRNKDVKGAFMKVLGGRGTAQX

SEQ ID NO: 12257 - DNA, 31737 bp, Homo sapiens
  ref <308>: DATABASE ACCESSION NUMBER: EMBL / AL022727
  ref <309>: DATABASE ENTRY DATE: 2001-09-13
gatcctttctgatggtattagtttccttacatcatcctgctggtgtggaagtgaaaagtgaatgataaattcttactacacagttaatctagttaatgaaactatcattctcagcaaactaacccaagaacagaaaaccaaacactgcatgttctcactcataagtgggagttaaacaatgagaacacatggaacagggagaggaacatcccacactggggcctgtcagggatggaggactgggggagggatagcattaggagaaatacctaatgtagatgacaggttggtgggtgcagcaaaccaccatggcacatgtatacctatgtaacaaaccttcacatcctgcacatgtaccccagaaaaactgtaataataaaaaaaggtaaaatagcgatataaaatagaaatttatgagtatatactgataaaaatataaaaaatgaatacatgaagggggaaaagggaaaactcttaatggcacatcagttaataaatatagagggcatactaggattggagaattattaatagatgttaaaattagtgggtgaaagtttaagacatttacatagttatgctgtctgccacaaattacttattaatttctcaggaaaaaggcataatgagatctgggggacaccatgttagtcaagtgactaaagttaacagcatcgattttaagacaaactatccttatacacttttctgaaatgttgcatcattattggctcctgaatgggagaaaatataaagaacattttggagataattaacaagatctgaatatgaactattgattacataatagtattatatgactgtaaaatgtcccagtttttatgattgtactggctatgtatggaagttaatgtccttagcaactatacactaaagtgtatgtagtaataaaaaggttgggaaaaatttcatagatatgaaaactacatttatatattacatatgtgtaaaagtaaggcaaatgtaaatgaatgatgactctggaaaagggtatttaaagttctgtattatacttgcaactttaaaaattacattaaaaatacattataaatgtaaaatgtagtaaactacattaaataaaaagatgacaataaaaagaacacttgtggttatgatacttcctgccagatcaaggccttagcatctactgttttgtctactctgaagaatttactacctcacttatagatctgagcctaaatgacacttccctagaagagctttccttgaacctttcctggtttaaactaatcacccatccattttattcatgaagccttgtcatttttactttatagtacttagtacaacttgtaattacatgtttagtattattatttgttttctttctcccactagactataaagtttgtgagggaaggaattgtgtctgtcttattcactaacaaatactcggcaaatagcaaaatctgtatgtatagtaagcgattgaaaaacattaggcaaatttataactattttaatatctgtatatactatatatctatatataatatctttgctctggatgtgcacttaggaaggcagagaaaatttaagtgtctctgatttaggtggtatgtgataataatgtagatacaagtaatataaaaatattttagaacattgatggtgattcaaattttagagctcaacccatcttatttttgttatttaagttactaatgccccccaaagtataaatatttataaaattatttttaagaagactttgggaaattattaatggtaagcttgaaggttggagtagatatttctaaaattagttgccaaatttataaatacattaataaaaatttcactatcaataatttttatttcaaataaaattcaactttaggttattatggctttaagatagtgtctaatgggaagcaaataaacattaatgcaagacttttcaaggtgaaatagacttagagcaccagttttatgatgtttagactttttcctaatacttaagaaattgtatgatgaaatcagaaaatacagaaaaataagaagcctggaataaaaatttcctgatatcctgtcacttacctcaccacagttagcttggtgaacttatttctagtgttttcttacacatataggtatacataaaattagggtcatgttctaagtgtagaatcgtttcttgagttttctccaccacttaacagtgagtatttctccataatattattttttttaaaaaaaatggccaattaacatatgctggtaaacaagtccatcataaaggcttaaaccaacaaatatttcatttttgcttatgttttgtgtttattgaatgttgctagggacttgtccatgtcattgtgcattagggatccaaactgatgaagtagacactatccaaagttctctagattgttgtgatagagggaaataaaagttgcaaaacacactctgcccttaaaatgtcttcccagaagttaaacaatcactgtaaccactgggcagttcttgtgaggcgttccaaatgtgagtttggaaatgtccctatatcccactcattgaaaagtagctcctccatccattgttcttcataaccctcgggttccactcagttgttaggttcattatctgccttctaagttattgcaggtgatagtttatgaaatgtttccttattgtataacatggatcactttatctcccttcctccctccctcccttcctccctcccttctctttttccttccttccttccttccttccctttttccttccttccttcccttttttttcttctttcccttccctccctccctctctctttctctttcttttctttcctttctctctttctttctttctctttcttttctttcttttttctcctctttctttcaccctccctgtctttctttcttctttctttctttttctttctttctctctttcttctctttctttcttttttttgagacagggtcttctctgtctgtactctgcagtggtgtgatcttggctccctgctgccttaacctcccaggctcaggtgatccttctgcctcagcatcccctagtagctgggactacaagtgtttgctcctacacccaatgaatttttgtatttttttagagatgagttttcactactttgctcaggcttgtcttgaactcctgagctcaggcaatctgcccaccttggcctcccaaagtgctgggattacaggtgtgagccaccaaacctggcaccataatttcaatctctctcattttttattagacttttactttaggttcaggggtacatgtgcaggtttgttacgtaggtaaatcgtatttcatagggtttgttgtatagactatttcaccacccaggtgataagcatagtatatgataggtagttttttagtccttaaaaaactaaaccaccctcaagtaggcctcagagtctacttttcccttctttgtgttcatgtgtactcagtgtttagttctcacttatgaatgagagtgtgaggtatttggttttctgtgcctacgttactttgcttaagaaaatggtcttcagctccatccatgttcctgcaaaaggcatcatctaattctttttctgtggctgcttagtattccatggtgtatatgtagcacattttctttagccagtctaccccaggagaggccggcagacaagggagcactcagattagactggtcccatcccacaggtaagatagccctgctccgttcaggtctggcagttaccataggctgagaccacctagaggagcatggtgagctttgggggaatgggcgtctctggccatgctccactgcagccgttcctgtgtcagaccctctgggcttttcacaggctgaagtcctgtccttgccacctttccaaatagctctccctgccagctcaagtgtccgcggggtcatggggtctcctgcagttgggattctggaggtctgtggcgagagtggccactcctcgtgtgttcaacggacctcttccccaggagtcactgcgggccaagaacatgggccagaaacgagtccgggtactctgcaactccgtgcaaagttccgaggtttctcaccctccagcccaggttctatgtcctccctctgtccaccctcaatgccttccctccgaagatcggctcggagtatgccagtcttcctgatatcctggtctgttgtggaagatgttcttcctggctgtgtcactgaccatcttggcccctctcagtttcaagctttactatcatatccctcatcatctgccatgtgatccttttgccagtgcctcatattttaatttcctaacatttgtttcaggctgattgagaacctacctggaacattgttttgattgccagagggaaagagaacatggcagagtatgtactagattttgaagtcatcaaaaaataacccacatcatttctcttcacattttattggcaaatcatattaaacagccaggtctgcattcgataggacagggatgtgcaattttaccatctgcctagaaggggagaaaaaataaaatatttataaacattcctaatgtattcaatttatgaaaaatactctactttcaaaatactcaaggaaataacaaataggaacttgataatgtttctgcttctaaaattggcatattcatcaaaagatgaaactctcagagtttgcaaaagctcgtgaagcaaccattctcatttgctatatacagtgatctatctgggaatgtggaatgttataaaatttctacagcacaatttgaccatatctattaactcttagatcttctaagaaatttataattagagccagtaattcagtttttcagaatataaactgacatttagacacaaattcatattgaattattggcagtagtagtaacaataatcaaaacaaggagtgtaaatatgctcaacaataggaaagtggttaaatagattttaatacacttccttggtgaaattaaatttgcagcttttttttttttttttttttttttgagatggagtctcgctctgtcgcccaggctggagtgcagtggcgcaatctcggctcactgcaaactccgcctcctgggttcacgccattctcctgcctcagcctcccgagtagctgggactacaggcgcctgccaccatgcccggctatttttttgtatttttagtagagacggggtttcaccgtgttatccaggatgatctcgatctcctgacctcgtgatccacccgcctcggcctcccaaagtgctgggattacaggtgtgagccaccatgcccggcccaatttgcagctatttcaattatgttttaaataccagaaaacataggaatattttctgatataatgcacacgaaaaaacgcaaactccgctggtagtgagttgggagaagtgcataaaggtagattgggtaacaacagagatccaggtaaaaggtggatccctttgtgttctttcattttttgtgttttctgaagatatgatcgatataggaaaaatgattcccattaacatttctataattagctctataattaaggggtcattccacatgcctgaggtagaacttgggacaaatatggaatttgacaaaagggaaaaacaaggagaaatgctatccaggggaataaagagatgaattgaaatagaatttgaaataaaactcaacagacatttcttcagtctcttctttttccacttatttgaaatgtcatctaaatattattatagttatatataatataattgtaattgtatataagataattataattatataatataattatatataatataataatatataatataataatatataatataattatatataatatatcattatcataattatatgtgatatagaactatatataatatataattatattacatcgtcaacctcatcttgcctggttttgtattgtttaactgctaaattacttgtaatgatgaaatgctttgttttgtaaagctttctctgttgcctgaaatgttgcctcatctgtgtccttacattactaactgtaaaccatcatttaaatgtctcagtttaagaatcattgccttctggaactagcacatttcttcagcagaggaactgtgatatttctcctctggactactgctgtcttgtgaacaataaatgtttattgaatgactaccacagataaagagtaagctaattcaggtcaatatgagaaaaaaggattcccattaacatttctataattagctctataatttagaaaagatgccacatacctgaggtagaacttgggacaaataaggaatttaacaaaagggaagaaaggataaatgctatccggaggaataaagagatgaattgaaaatagaatttgaaataaaactcaactgacatttaaggtttccagattgagatgcacacacttagctggtttaaaaccagctagattggttgggtgcagtggctcatgcctgtaatcccagcaatttaggaggctgagatgggtggagcacctgaggtcaggagttcgagaccagcctggccaacacaaagaaaccccgtttctactaaaaatacaaaaaattagctgggcatggtggcgggcatccgtaatcccagctacttggaaggctgaagcaggagaatcacttgaacccaggaggtggaggttgcagtgagctgagatcgtgccattgcattccagcctgggcaacaagagtaaaattcattctcaaacaaaacaaaaacaaagccagctagattgaagccaaattacataccaaaaacagttctgaaaaggtgcatatgatgaattttatcaagagatcagagggttcaaagtgtttgaagactttgattctgatggaataatttttggcttggaataactggtaatttaattataaggatattaaaatccctaactaaaggcgtagacaggatggttatagaataatagtatacaagtggaaggcaatccatcaaagtctcctgactaccctgaagttgataggaaattgacatgacttgtctcaaggaacagagtacattgggggaacttctgaaaagaaaggagtttctaactttgaagacatgtcatatgggttcagcattgcttcctaaacagaagaagacttttctttctttcctttttttttttttttttttttttttttcctgagacagattcctactctgtcacccacgctggagtgagtggcgcgatctgggctaactgcaacttctgactcctgggttcaagcgattctcttgccccagcctcctgagtatctgggattacaggcgtgtaccaccatgccctgctaatttttttgtacttttagtagagatggggtttcgccatgttggccaggctggtctcgaactcctgacctcatgtgatctgcccaccttggcccccacaaagtactgggattacaggcgtgaaccaccgcgcccagccaacagaggaaggattttctaattgttgacagaatttagtgaaatcaccagagcctggaaaataggaaaatgagttcaaaggtcattaccatcattgaagataaggaaagactaagaagattctcatcacaatggagtacttcttatttcttacagaaaaagattcttggcatcagcctcttgaaggcctccttcatatctttatttctaaggctgtagatgagggagttcaacatggatgtgatgattccatagaagagggaaaccatctttccccagtccttagaggtggatgaaggtggttgaagatacatataaatggctgttccataaaagagggacaccacaatcatgtgggacccacatgtcccaaatgctttttgccgtccttctgctgacctgatttttaatactgcttgagctatgaagccataggagatgaggatcaatgtcactggaattagaagaattagtacactaaagaagaagagctcagcctcaataggctttgtgtcagcacatgacaacttgagaagtgcaggcacctcacagaaaaagtggtccacttcctggtgaccacagcgtggcatgttaagagtcaaggaagactgcagcactgagttgccgaaaccaatgagccatgagaaggctgccatccttaggcagaaccaataattcatgatgactacatagtggaggggtctgcaaacagccacatatctgtcaaaggacataacagccagaaggagacactctgtagcacctagggccaggaagatgatgaggtgggccacacagccagcatagctgatggtctttttgttgcaaccaatatttaccaacatatgagggactgtagttgtggtatagcagagatctaagatggagagattagtgagaaagaaatacatgggagtatgaagtttgggatccagaatgcacaccatcatgatggacacattgccaaatatggtgattgtgtatgatattaacaggaccacaaaaaggggcatttgtagccaagccctatctgagaagccaagtagtataaactcttttggggagctctcattttcccaattcatgatgactcacttatttcgcactcctaaaaaaatgtaagataggaaagcaatcaatgtttgtttattgaatactcttactggagctgaattaaatttaatgaatagctcagcatcaaatacaatttacagtcaagtggataaagcccttgtaaagtataatatggttatgtttaagcttaaaagtagttcctgtgttttcagtagtgtttaaattactttaaagaaaatcattacatttaaatgacataaagtatgtaacatatgcataacacatggaaaattgtgagttctcaatgcattttatgttctctcctcttcttacctcctaacctatcttaataaacagtttagaaagaaatattacttttactccaattattttaaatttggcctgaaaatgctgagtaatatagagggtataagagttgaatctaaatctgcaattgatctaaagaaattttgcttcttttagtaacatctttacgtgtttttttgagttgtgtctgtctcctaaatgccatgcatgtaggtccatttccacaaagaactaccgtgggtattagtaataaaattatggctacttgtgatatatagtaatgaccacagatgtcatctccccatctgcaaataccttaattaaaatagcaaaactgataacataattgttgctttacttaacatgtgccagaaactgctcagtgtgtgaaatacattctttgtaattctcatcaaacccctcacagtcatggtttgcattttattgcttctgtgattcagtaagaataaataatttgcacactcattattggtgaggtcaagactaacacctaggatttaaagatcattctttcttttataccgtatttccccctaaatacacagatagtacaataagaatgactgcatacagcacaaaagtggtcataaattaaaatagaaacaaaccaaaagtcatatattcaagttgattttcttcagtctgtaaaagtcatcagttatttagttatattacctaagtgcacctaagtttcttcagtctactttgcatgtttaaatgaaatgtcatcgaggtggtttacaccatttgaatttgcaagcataaaaatagaaagatagactgaagagagaagagaaaataagtattgacacaatttaccacagaataagataacttttccagagtaaaaacactgatatataaagtataatttgataatggaatgaataaatgaaaatgaacagagatgaccttgagatttttaacttcttccattatatatgattttttttagctatagatacacattattttttggcaaataacagtaatacacctttggttgaaaaatagaagagaatatgagattaggcttttttgaatgtccatgtaaatttacaaaatgataaatatgtaaggtaatacatacattagataacttgatttagccactttataatgtacacatatatcaaaacatcatgttgtacactataaatatatacaatttttactcattaatacaattttttatatcagaaaaagactacacagaaagataaaacataaatggcaagatagaaaaatatacaatgtttatggaaaaaatggttattatattaaaatataaataattattacataataaatagaaaaagatcaaaagtccaatggaaaaaaatgagcaatggacataaataagcagtttggggaagaaaacaacataaaatgacagtgaaagtataaaagattataactttttcattattgaagaaacacaaataaaaacaagaagaaagtatcacattgtcttcctacttagtagcattaaaaaaaatcactgttaaaggttagctgttaggtacagtgcctctggagccagaatctgccagggttttattactggattgtgtgatcctgggcaatgaatgaacattcttgtgctacattaaaaaacaatctctgacttgataaaaagagagtattgtgaagctcaagtgagacaatgtatacacatctgaacttaggaccctgtcccaagcatactaagcatttaatgaatgtgagcttgatatcaatagcagtatcattaatactaatcactaataagtcattaatagtaatactatatcattatctcagcttgtcttgtatatgagaaaacagaaaatttactattggtggttcaagtgattgttataatttcataatattataacatgaaattattgaatttcatattatcactttgtctttgtttctagcataatatactgagtacatagttttccagtaaatggaagttaaatcaatgtagtaggtgatatctggttatctaaagggcatggaataaaagaggaccctattcagtagctgttattttctactcctattttttcacgtcctcttctcttcacattttatatggcactgataatttctcttattttcttcatattttatatggcgccaatttctcttttacgttatcagaaaatgaacttacctcttgacaagaacatgttgattccactgtcacgttgactttttgtcctatttctattttctacatgaatcaaaagaaatcttaaatcccactgaccgtttttatgtacggagatataatgagcaaaccattcaaaagggtgaaaggatacgaaggatttttggaatcactgaaaatacttcatattaatttcaaagttcccaggaaacaaattgggcattctgattatttaacatgatgcaactcagaggcagggatgtaggtgagatgttcttgagagatccttcccactcatggtaatataatacactgtattagacgccactcaccttttttctaaatgtccaagagatattcacgcctttctttgtgctgtgtttcaaaggaagtctggttcaaagacagattaataaatgcagttgagtttttgaattttcaatctttacgacattctaactcaactaccttttgcccactgaccaagaatgaaattagcatgaaacctggactgcatcaagaacatgtgagaaaaatacttatgaggagaggaaaatgtgtatagttagtgtgtcttcagtcattggggcatttttgactgacatgggctctcctcaccaggttcctagtggatttctacaacgagaagttgactttatagacatcaacaacattggaagtgtcatggaaagaaagttatgcctttaaataaagccaaccaatatttattaagggagtaccactcacacaattctgtgtcctctttttagccctagagattctagagtccctcaagtttaattggtcattatgtccagagagtcaataagtcaactctattcctaactgggctggttgcataatactaccacatatgtcgttcacaaattctaaaactagggtgaagattagagtaacaaaaataaacaatgaaaaataaatttaaagttgtttaattaggaaagcacaaggtttaatgaacttatagccccaaattccttttaaatagttgcaaggtcaaatagggagtcctatgatggcgtatagggaaaaatgatatttctattttcactgattttagtaataagtgtttgtaaactaaagctaccagagatctgtaggttaaaaattatgtcatacaaagtcacttaacatattaatatacacattgaaatttaaggttagcattaattcactgggtcagaacacacagaaattacatgaaattgcaatagggggaatagtttttgaaagaagcagctgagggctggggcggtggctcacgcctgtaatcccagcactttgggaggccgaagcggacggatcacctgaggtcaggagttcaagaccagcctggccaacatggtgaaacctagtgtctactaaaaatacaaaaaattagctgggcatggtggtgggtgcttgtaatctcagctactcgggaggcagaggcgggacaggagaatcgctagaacctggggagacaagataagtcattgccctccagcctgggcaacaaaagcgaaactccatctccaaaaaaaaaaagctgatttatgcaagttatgacttaatatgtgacttaataagtgcttatcctaagatcttagtaaaataaagaagttgtaattgaattgagcatcagcctagatataatcttaaggaaactaatgtgctcgtattttaatgtatctatttttcctcatttttctttttgtgtagaatatgatcattttctaaattaggacattttcttagcctgtgatttttgtaactatatgacatctgttgtagctaataatttatatataagtttaatagacatatatacatactttctatatgtaatatatatttgtaattagttttcaaatacaatttgttgtgcttggattataatagaaaagttattttattttttgtggttttacttttttaaaaaaattttaccttaagttctgggatacatgtgcagaacatgcagtattgttacataggtatatatgtgccatggtggtttgctgcacctatcaacctgtcatttaggttttaagcccctcatgcattaggtatttgtcctaacgctctcctccctgtgccgccacccttcaacaggccccagtgtgtgatgttccccttcctgtgtccacgtgttcttattttcaactcccacttatgagtgagaacgtgtggtgtttggatttctgttcccgtgttagtttgctgagaatgatggtttccagcttcatccatgtcccggcaaaggacatgaactcattcttttctatggctacatggtgtatatgtaccacattttctttatccagtctgtcactgatgggcatttgggttggttccaagtcttagctgttgtaaatggtgctgcaataaacatatgtgtgcatgtgtctttatagtagaattatttataatcccttgagtatatacccagtaatgtgattgctgggttaaatagtatttctggctctagatctttgagaaatcgccacactgtcttccacaatggctgaactaatttacatttccactaacagtgtaaaagtgttcctatttctccccagcattgccaacatctgttgtttcctgactttttttttcccaatgaaatgatttgaatggacacttaaaactgttcatgagtatacaagatgataaagaaaacatttattaaatgaataaaagctaaaaagtgaaatgttacaagcaaatatcaaatatcccgaatctctagaattttattgttgaatatgccttagttattacaagtggtctttattcttggtgacttagggattcccaagaaatgtgcaatcactcctggcaactcaaagtagtaataagttaacctcaagagaacaatcttggttaaaaaaaaattttaagtgtattttataaattattattatttttattttactttaagttctgggatatatgtgtagaacgtgcaggtttgttacataggtatacatgtgccataatggtttgctgcacctatcaacctgtcatctttaagccctgcatgcattaggtatttgtcctaatgctctccctccccttgccccccaccccctgacaggccccggtgtgtaaagttcccctccctgtgtccatgtgtgctcattgttcaactctcacttatgagtgagaacatgaggtgtttggttttctgttcctgtgttagtttgctgagaatgatggcttccagcttcatccgtatccctgcaaaggacgtgaactcattcttttttatggctacatagtattccatgctgtataattgtattaatagcacatccaggggtgcagcattgctacatgtcttctctatccaggcacactgatcgatcagggtaatttatttattcattgtttgcaaggttctatgccagccagccagtgccaaggacttcagagataagccacaatacctgcctatgtgtctggttggaacatgaacatggaaacaaaccatttaatcatttactcaataaatctttatgtcatggtgataagtgtcaggcactgtcatgtgcacaggagatatattgataatcaaaagaaataaagtctctgttctaatgaagcttacatactagtaaggagatagaaaactaataataagtaaatagatatataatacaatgtcagatagtgataaatgctatgaagaaaaagaaagcagggtaagagaatcaaaattagctgaggctgttactttagacagcatggtcagtcagtttctgtgagggggcaacatttgacctgaacagagttaggggttctcattcacttggaagattctaaactgagatttcgagtttgaattttttttgaaatgttgccagttaatgcatcaataatttatcagccggtgttcattatataacgttatactttaacaaggacactaagcactaaactatttaaagatcttcgtctttacaaaggtactacaaaggaaactacaaagactgtagtttctgaagttaagaaatgcagaccgatcctttgtttctgcattcatccatttgcattgctataaaggaatacctaagactgggtaatttacaaagaaaaaaggtttattttggctcacagttgtttcctgactttttaataatatatatattttatatatattatatatatatatatatttttttatcattgggattaaattttggcctggtgttcactttctttatatatttatgaacaatttaataatgaggtgaaatagccttaagtctgatatatgatgcacccacatataaatggaaatggcatgcacaaagacactttactattggaactgtattggaaaatttatgaaattttaggtaaaattgcacctaaaattgtgttattagtgactgtaagtagcaatgctaaatttattgtacttgatgaatgaatgtatttaggctagtcatggttactttggtttaaatgtctaaataacatctttagttttaaaaatgtgtttgtaatttgtactattgacaggaggatattcttggactgcagcggttattggcaatgtgtgatttgtgttttcttactttatagaattatctaatgtgatatgctgatttttacaggtaatatttagatatttccaataattgtatatttgacaacctactaaaatgatttgctttgggaaaaaactgaaaaacaatactcaaacataggctgcctgtaagaggctaactttaacttaaagaacacacattgactgaaaaaaatatttcatgcaagtagaaaccaaaagacagcaggggtagctctacttatattagacagactttaagtccaaaactgtaaaaagagacagagaaagtcattacatgataaaagggtcaattcatcaaaaggacgtaacaattgtaaatatatatacacctaatactagatcatctaaatgtataaagaaagtattaatagacctaaaaagaaacagactgcaatacagtaatagcagggtttttcaacacttcactttcaacaatgaacatgtcatctagacagaaatcaataaggaaacactggacttgaaacgcacattagatcaaatggacctaacagacatatatagaacattccatccaacagcaacagaatactcattcttctcaagtgcaaatgggacattatccaggatcaaatattagggaacaaaataagtctccacagttttaagaagatcgaaatcatatcaagtatcttttctgaccacaaagttatgaaagtagaagtgaataataggagaaaatttaaaatatttacaaacgtggaaattaaacaacatgctcctgaataaacaatgggttaaataaaaaatcaaaagcaaaattaaaaaaaatcttaagacagatgaaaatgaaaacacaacataccacaacttatggcatgtagcaaaagaagatattagcaagaggaatgtttgtagtaataaatgcctatattaaaaaagaagaaagatcccaaacaacctaatgttacatttcaagaaaccagaaaaagagaagagcaaactaatcccaaagttagcagaaggaaggaaataacaaagatcagagcagaaataaataagaagctagaaaacaatagaatgcattcacaaaactaagacttgaatttttgaaaagataaaaacaattggcaaaacttgagtagaccaactaagaagaaaagaagactctaataaagtcaaaaatgaaagaggagacattacaattgatactacagaagtacaaaagctcataaaagaatactatgaacaattttacaccaacgaatagggtaacctagaagaaatggttaaatttctagaaacataacaaaaatgaatcatgaaaaaaacagaaaatctgaacagactaataatgagtaaggaggttgaatcagtaataaaagtcttctaccaaacaaaaacccagaatatgatggattttgcattcatggtttggaagaattaatattattaaaatatgtgtactacctaaagtgatacacagattcagtgcaatttctataaaagttcaatgacttttttgtttcacagaaatagaaaaagcaatttaaaaattcatatggaatgacaaaaacccctaagtagctgaagcacttttgagcaaaaagagcaaagctggaggcatcacactacctgtttcaaaatatattacacagttatagtattcaaaacagaaaggtagtggcataacaacagacacacggaccaatgtaatgtgatagagagcccagagataaactcatgcatttgtggttaactgatttttgccaaagatgccaagaatgaacacactatggagaaagggcagtatctttaataaatgatgctgggaaaatcaaatacccaaatacagaacaatgaaattgaaaccttatttcacaccatatgcaaaaatcctctaaaaatggtttaaagatttaaatgtgtgaccagaaaatgtaaaattactagaagaaaacatagggaaaaatgttcttgaaattaatcttggcaataatttattggtgatgatctcaatagcacaggaaaccaaagcagaaatagacaaatgggattacctcaaaccaaaaaccttctgtataacaaagtaaataacggattgaagagacaacccatggactgggagaaaatatttacaaaccatacatggctaatatccaaaatatgtaagaaatgcaaacaacttaaatttgttagcaagaaaacaaagaaccccttttaaaactgagcaaaacacttaatggacatctttcaaaagatgacataaaagactaacagatacataacaaaatttctcaacatcaaggaaatacaaattaaaaccacaataagatatcacctcatacctgttagaatggctatatcaataaaataagagttaataagtattagcaaggatgtggagaagggaatccttatatactaatggtagtaatgtaaattaatacagccattattgaaatcagcatggaggttcctcaaaaaaagatagaattaccatatgatccagcaactatatttctgagtacatagccaaagagattgaaattaatatgttaaaaatatattggtagattttcctctaatttggtcttaacgtctctctttgaagaggagccagaaactctagccctgctctgatgggctccagtggaggtggttgtggttgtggatgttttcagtgtttttttcgtggaatacttctatatcctgatggagagctaatgcctaattgtcctatttatgaccaggtgtccctctcactggaaactcattttcactggcagacacccttgtggctcttgtctgactagtgtgtccagttcattcctaccaagataaccactctttaagagagccttgtccagaaaagaagttaatttcacgtatgtcagtcacgcgagacgcaagtaaaaaaaaacacgtaatagaagtagttttattacttaaagatccagagagaagaaggaaactttcctcacaggcctaacgggagaaggggcagccctcagagacatgcatgctcaaccagtgggtgggtagcaagggagagtgagtgacagccgagaaggccgaagcctttactggggtacacagcatttcctaagcagggagtaactgattgctgggtttaaagcaagcaggcatgagttcttgggagttatgttgtattgagaggtgttcactactgcaagtctgcagtccatgtggggtgtggggatcagtgggataagtcaaacaggttgtatctaggtgctccacaggaaggtggaaaccaagaggccaaatatctggattgaccacctgaagaaactgggagaggagaactcgaaattgtgttaagggtgactaagccctgcttctggtatgagaaagttcaacttatattgaaaataaacactgaggcaacataaaatcataagaattcactacagatatttgcactaccatgttcattgtagcattattcacaatagctgagatatggaaggaacttaaatgcccatcaatggataaacagataaatatataaaagggatataatgtgatatatatgagccacattatctatataaaatggaatactatccagccttaaagaaaaaaggaaattctgtcttttcaacaacattcatgaacctgcaggacattatgcaaagtgaaagaagccagacacagaaagacaaataccacgtgatctcactcatatgtggaatctaaaaaagataaactcatgcaagtggagagtagaatatagctaccttgggggtaggggatggggaaaggggagattttaaacacaagatattttttaaccttttgcaggaaaaatcttggaattgaatttaaaagacaactgggatggcataaataatataggtcagtctcaaagagcacgtcattagtaaggaatagatatacagtttagtctttatgtattctagtttttcagttgaatggctctgaaatcactccttttttccagttgtcttgtaaattttacccttagccccatggaaaactgaaaaaaaatcacatggctcagtaaaacccattccctttattgtaaatataactcacagcatcttttcccatatttgtaagtgataaattcactgtcatcacagtaagactataacatcatactgaagatatttctgtgaagagttttgtactgagaacaccacaccaggacaacttgaagggcattaattgcaactttgggatttatactcccaaaggccccagtcaatgaaagagtatcccattattctttttggttccataaagattccatttactctgggataaagggtccatcccctgataccttgaatgctctaaagtattcccacattctgctaaaaagcagatcttttggacaaactcaggctctcttttctgtagcaatgacaatcacagttatttccagactctgttctccatagttagatttaaaacattggcaaaaatgttataagaaggcaattaggttgatgtttctaggttgcatggcaaccagagagccccttcatcagtttatacatgatgaggtcgtaggccaggtagagagtgacagggaacagggacaaacacaggaaggtcagtactgaaagaagttggcgcacttcttaaggggtgtacagcttctgtatttcaaaattgcaggaagtgtagattttaaatgttcttactacaaaaaaatgatgtgtgtgaggtgataggtacattaactagcttaatataatcattctatgatgtatatacatatcaaaacattacaatgtactccatacatatatacaattattactagtcaatgaaaaagtaagaaaacaaaccagatatagtataaaggaatgaatatgacacgaattgggaaaatgtctcttagtaataattggggaaagaagagacactcagccatccattttccctacagtgtttgatttaaaagaagagagaagatattttattccatagttcataaaagctacatttgatagggtcttcatttccctcttttcctccaagaagaaaatcgaagctgcaaacttttctctacgtgagttctgggtttttttttttttttgtcccttatttcctatcctttttatcgactctggaagaatgctgaaagatggtttatacaacagaaaaatatcagatttcaccttttaattactgtagtaaggaagtcaggcagctgcattaggaaagaaaattatacctgcattagcaaaagtatccacaacatttgagttcaagtatcttacagaatattacctttcaacctagcgaaatttttaaaaaaattcttgcaatttttccatgatttctcaaaaggtaatgatcatttcattatcaacaatatggaaaagtgtacagatatctttgtacctgtctggagcatctgcacagacttggcccaagttcaacgttcctagctctccagctgtaactcaactaattaggcaaacccttacatctttttcaagagtcaagattagaatatttgagttgttaaaagtttttcaaaacactgaaggtgagttgggtgtaaataaatttgtcttttgtcatattttatcagagagtatgagaggaagagttggctgtggcaggaggggagcagaagggggatggcaatgctatttaggaatattgaagaaaacccagaaatacaaattataagttgtgactcagaatttaaagtatagttcagttattggcctaaagcatataaaattttttagaaaccacatttaagtcttcttgtccctgtctaacaatcctgtgttatacattctttcaatttcaaatgccacattctgacctcctcttcactgttgtgcctcaaagcactcttcctttctctcttacacctcccggtgtttttgttagactctgtaatctttctgtcttccaataataattatacccccatgtaactttggaagcactctatcactgatatctctactctatttcactttattaatcagctttgcttatattgtgaatttttataagttggtgtgtgtgtgcatgtctgtttaaaccttcatttgcatgttattttattcgtctagaaataaactgctagcataaataaatgaatatcatttaattctttctataatcatatccaattatttcttttcagttcatattaatattttaaagtgactacctaattgctctttaacatgggaagttcctatctataagtaagattattatggctgcagttattcctttctctgtaactgcaaaattggaaatagtctgaaaatgcaaaaaaaaatcaatttaactttttaaaataaaaaattattttcttaaatattgtctttctgattatggaatatcttagtcttcatttatccaaatgttaactcaaggatgtatataaaagaactcagtaacttgaaaagctattacttgtatccacagctggacaaatatctcaatgaagcatacaaaggaaactgtataaaaattctactgccataatggtgcacactatctggaattgggatacttttttctccaatctgtttgcaagtgagcagttggcaatgcatggacagactttgagtttatgcgattctttctttaggtacaggaaaaataagaatgttgatgaaaaaaaatgcaagttttgaagacttctttattctacttggattttctaactggcctcatctggaagtagttctctttgtggttatcttgatcttctacttgataacactgataggaaacctgttcatcatcatcctgtcatacctggactcccatctccacactcccatgtacttcttcctttcaaatctctcatttctggatctctgctacaccaccagctctatccctcagttgctggtgaatctctggggcccggaaaagaccatctcttatgctggttgtacagttcaactttactttgttctcgcactgggaaccgcagagtgtgtcctactggtggtgatgtcctatgatcgttatgcagctgtgtgtagacctttgcattacactgtcctcatgcaccctcgtttctgccgcttgttggctgcggcttcttgggtaagtggttttacaacctcagcacttcattcctcctttactttctggatacccctatgtagacatcgcctagtggatcacttcttctgtgaagctccagcacttctgcgattatcatgtgttgatacctaggcaaatgagctgaccctcatggtcatgagctccatttttgttctcatacctctcatcctcatcctcacttcctatggtgccattgcccgggctgtactgagcatgcaatcaaccactgggcttcagaaagtgcttaggacatgtggagcccatcttatggttgtatctctctttttcattccagtcatgtgcatgtatctccagccaccatcagaaaattctcaagatcaaggcaagttcattgccctcttttacactgttgtcacacctagtcttaaccctctaatctacactttcagaaacaaggatgtaagaggggcagtgaagagactaatggggtgggaatgggggatgtgacagggaaatcatgttggctgttgtttttcctagggtcttatccattttgaaaggttgtttccctgcttctttgtgatttgtgtttcatctaacagctcacaaaacatggaatagttcagttcccccatttgttgctctgtttaatatttagttctgaaatattatgttgagataaaggttttgattagtaccattttgttcttttacaattctatatttatttccatgaaaattgtggactgtggtttcaacataaataaatgtgtgtgtgaataattatgaggagattatttaaaaaatattggcaatatttctgacaatgtgctaaattatgaactgaccattgatatgtataggaagagaagggcaatattgcaaagatgtaggctgaagaagtttttggttattaaataaaccttaaatgaagctaaaaatagtcacagcaaagaaaaatagtaaacataatgaataacaccatttattatatggtaaaggatatgtcataattttttggttgaagttcactttttaaagacactaaattatataatttatcctgtaggtctgcattcttgtcacattgaacagtaaactaatatctctttaaaatggctgattcgttcatctgtccatttattcattaacttattcttcattagctaaatcttactggacatgtactctctcccagtttgtgaaattcttggtaacatgtataaatataacatactttgtctgaacagaatgcactctctatcgggaaaaatggcaacataagataaaagatgaagtatctgtacatggcttaatttgtcactggggttaatgctaataaattaagatagcttttaaaaatcagaaacaatatactctgattactcttcagattgtatacatctttcactttttaaaaatcgaaagcaaaacaataagtttgataataaactctgataataaattcatagctcctgtaggaagacagtgctattaaatgaaacaaagcagaatatgtgcttaatttgctttagttggcctagttaatgacatattaaagatagcttaaaactcttaacatccttgttctttgctgaatagcattattaaaaaaatttctttattttgattttattttttccagctttactgaggcacaaataaaataacatatatttaatgtgcacaatgtgattatatataaatcaaaccaaattgtgaaattattaccacagtcaaattaacacatccatcatctcacatcgttactgtgtgtagggggagcggggagggtcaggacacttaagatctaatctctaagcaaatttcaagtatacagtacagtattattaactatagtcaccataatctacattagatctccagaatgtattcatcttatgacagaaagtttgtacaatttggctgtctctccacttcccaccctccagcccatggcaaccaccattctattctctgcttctatgggttcagtttttttatttttttgatacacggtctcactctgtcacacaggctggagtgcagtggtgcgatcttggctcactgcaacctctgcctcccggcttcaagcaactctcctgcctcagcctccccagtagctgggactacaggcacccgccaccacgcccagctaatttttgtattttagtagaaactagttctcaccatgttggccaggctggtcttgaacccctgacctgaaatgatccacctgccttggcctcccaaagtgctgggatgacaggcgtgagccactgttcctatccgagttcaatttttttagattccacatgtaagtgttatcatacatcttttgtctttctgtgtgtggtttatttcacttagcacaatatcctccagttcatccatgttataacaaatggcaggattttctttttattggctgaataatatttctcgctgtgtgtgtgtgtgtgtgtgtgtatgagatcacattttctttatccattcctccatcaatggatgcttaggttgtttcttcatcttggctgtcatgaatagtgctgcaatgaacatgggggcatagatacctcttcggaatacttacttcatttttcttggataagtacccagtgggattattgggatcacatcacatctcacacagacttcacaaaatatgagaacatagattcctcctgcctccgtggaaatcttaccatttgtaatatgtcatgtgtcactccagcttctcaagatctacaagactcttttcttttcaaatttattgaagtataatttatgtacaaagaaatctacacattttaagtatatagttcaatgaatttttttatattttctttttattgtatttttgttagacatcaaatattggatttaataagctatcggaaaaagtgtataattataatcctttatactgtaacagtactacacaacttataaagcacattaatatattttgtttcattagaattttggtcatcatagaaaccctaaagctttgttgactattagcctcttgaaacaaaagaaaaataagatataaacattattgttcctatgttaaagattaggaaattgagtctcagagagattaagtagtcttgtctaaatgcacgcactaacaaatggcaaatttgagtctcaaagacaggtttctcaatatcaaattgaaagaatagttcagtgagtttgacaaatgtataattgtgtaaatgccaccacaatcaagattataggacatttctattactccccaaagaacttccgttttgtagtcaactttccccttttagtcatagcctgaggcagcattaattttctctaaatgtacttggtttttcccacttttagaatttcaaataattgcaatcatgcagtgtgtaatctttgggtgtggcttgtttcatttagcatgatgtttttgacatttattatgttgccacatgtatcagttactttttcctttttattgcttgttagaactccattgtacgaatgtgcgacaatttatccatttatctgtgaagggctttgggagtatttaaaatttttggctattatgaataatgctgctatgaaaatttgtatacaagtgtttgtgtggatgcatgttttcacttaatttgggtaaataccttttatttgtacctctccaggaggaccacatgcttagtgtatattatctttatgagatactgcaaaaatgttttcaagtggctgttctattttcacttcaaacagcagtgtatgagagttccaaatgaactcacattctttctaatacttggtattgtcagtttttatacttttcacctctcaagttaggttacctgtggctataatttgcattgaggggtgttgacattgaccatcctcttgtgtgcttttcatatgcttcatatatgttattttgtgtagcttctgttcagatattttactcactttaaaaattgggtcatttgtcttcttattgttgaatttgaagttctttgtatactctgaactcaagtccttggtcaaacaaatcttttgcaaatagaatactgtcatatctttcaaagagaaaaattttaactttaataaaatacagtgtgtcatttccacagaaaaagcctggtggcattttgattggggattgcattgaatttatagaccaattggagaagaactggcaacttgacaacattgacttttctgatctggggacatgatatagatctccatttacttacatcttattttctttcagaagcatttgaggttttcattgtatagctattgtccatattttgttaaagtcacctctatgtatttcatgtttttagataccactataaattgtatagaaatatgactgatttttttccatcgtctgttttattttattttattattatttaagttctagggtacatgtgaacaacgtgcaggtttgttacgtaggtatacatgtgccatgttggtttgctgcatccatcaattaatcatttacattaggtatttctcctaatgctatccctcctgcatcccccccaccgcccccacaggccctggtgtatgatgtttccccccaggtccaactgttctcattgttcaatgcccacctatgcgtgagaacatgtggtgtttggttttctgttcttgtgatagtttgctgagaatgatggcttccagcttcatccatgtccctgcaaaggacatgaacacatccttttcgatggctgcatagtactccatgttgtatatgtgaattttctaggccttaactccaactgagcttcccatctacaatgctttaatagtttgtgatctactctaattcacattcctcccatacaaagcactcaaattaacagaagctcaacagagatcatttagtgtcttttattccttttgattcctcagatgtgactttcaatgtgttttatttatctgagtgtgtattgtagagaaaaaagttgagggttgcttccttagaaatactttgctgtaattaaatcatgttatgccagctgtattttcacaagttactaacatcacacctaaaaatgttaacatttgctggcacccagtagattggcaggggccaaaaactctcctacaattctagttaccaaaacatgaaaaatattggagcttggtacaatctcctacagaccaggatatcagacatttcctggattttgataactgattgaattctgctagtccccacaggttgtaggatcactggtcaaattcctctccaataagatagagaagtttagacatatgattatatgactatttaatcatatttatcttaaaaataatatttaatatattttaaagtaaactggaatgatatataccaagctcatggtagttgtctctggatttagtgttgggtcagagagtgacagttgaaggggatatgaactttatctgtgatactttatgtgctaaaaattctgaaaataaaaatgacaaaagttatggttgatgattctgaatgatgggaacataagggtttatttttaatattttaaatatctaaaataaaggatgaagaaataatatagaatgacttgttaaaatatcacttcaaattaaaattcactataatggtaatagcagctaacatgtattgaatgattatgcactaggcatcgaggataatgtttacgtatttttcacatggagttttcacaacaatcaagactactgaagccaagactgttttcagttgcttcacataagtggacaggaaaatacctgatcatgctcttaaaagtactgactttaaaatataattgtattgtaaatgtgacttgattttcataccaagactttgtctggtacacatggaatatatcacctagacacaatgtaacaattgaaaaatcttcattagtttataaactcacgatgtgcttttttttttaaacatgggatgtaggctagctatcacagctaatttagcttttttatatatttctgcaaagcttttaacaagacatcaaaagaaattattgataacaatattttggaaatattaaataattttgttaaaagttttctgagtttggtagtgaccttctgagtatagtttgaatggtcttcaaaggtaatttttaacacttttgcagggctgaacttggccttgaattttagagatgttagacacaattaaaaattcaaattaataaaacaaatatgtataatgtagtcattatatttccttttaaaaaatgtttcatgccttttcccattcccaaattagactacctaacaagctatatctcaaatttggcctctagcatactgaagaattggggaagaggtttcaggtaactcaagataacccattcccttccctgcagatacagctcaaagtatttttctctgctatggctggactatagattccttgtcatcctcgtacaacaatgtggcatcatgccaagaacatcactgagaaactgttctaaccaggataactccttgaagggcattaattgctactttgggatttaccctcccagtggcccaagtcaaggaaagcaagtcacattcttttgtttccaaaaagggcccattgactctaagataaagacccatcccttgatacactgaaagctctaataagtttatcttttgggtaaaactaaatttttttagtagactcagagctttctcttctgtagcaatgatagtcatagctacattcagactgttttcctaattgatgtagtagatgagggaagtgtaggcatttatgttggtgatttcaaggtgatcaaaatcagagatcagatcagtctgtgcatgatgagggcatcagctaggaagacaatatacagggaatgtggacagatacaggaaggacagagtgaaaggcattgtttgagtactgcttaagtactaggtaatatataaagaaatattatggtaagaataaaaaaacttggccagtgacatggggatggggaaaagagattattttctccctccgttatacctgatttccaaaactagagaggatcacttattcctagtccatgaaagcaacttttaacttttaatttttgtgggtacacaataggtgtatgcatttatggggtacatgagattttttttgataatttctttctttttattttttgtagagacatggtctcacttcattgcccaggctagtctcgaacttctgggctccagagatccgcccaccttggcctcccaaagtgtcaggattacaggtgtgagccacggcacccgacccaggtatttttgatacaggcatacaatgtgtaataatcacagcaggctaaatggggtatccatcacctcaagcatttatcctttctttgtgttaaggataacttaaacttttgatatggcttttgataaggcttttaacttttgataaggcttttattttctgctccaccaggaagaagaaaattaacccagaaaaattcctaccttttccttgcttgcatctggtaagtttttgtttgtttgcttcttatctcatatctcattctaacctctctatgtaagattgctcaaagatgggtcatgcaattggcaaaggtatctcacagctaaatgttgttttagttaatgtaataaattatcgaggcaactgtacaagaaagaagaaaattttatctgcatgagagaaggtaactataacatttgtgttcatatttctcatgatgtattatctcctattctagagaaatttttaaaaatctcttggaaaattttcatcttccctcaagggctgtgacctctaagtcaagtaatcttcatgatttactctttgactattgctgctttttgattcagctatagcttttaaaattttcttttaaaacaatgtgcagactgattttcctggatggttgtttaagttgttgaaagtaatctagattagtgtaacaactggctaatgattatttacattaccaagtctgttaaaaggtctgaggtcaatcttttaatcttgggaccaaactgaatgttccaaacttttctgctgaaactcaaccaattagctactcctgacatttctttcaggcattgaatttataaaacatgagcgattaagagacccctaaaagaggcaatcacaggtggccccacaatgatttctttcttcctgtgccatagccaattgggaggtataagaaaaataaccgactgtggaaggaatgaaatagagggcatgtggcaaagctggaagaggcaaagaattcagagaaaatggggtatttaaatggtgggttgctatgcctgacacaataactatataacaaaaataagtatcatttttttctatgaaagattgaaaactcactggagaaaaagcatcacctaggagtcataactatttgtaagatatattttatttttaacaaaaaaagtaacatgagattcactgggcacaatgtattaaatgatgaacagccacttaatgattcattaaatattcagaactctctaacttggagaataaatatgtactaattatagctcatgctcagaatttatatactatctaaattattgtcctggagaaaaatacatcatgtagaaaccttcttcaggccctgtggttcagcttcttgaaccctgtgatagacacacctgcaactctaagaactacactcaggttctcctccattttcctgcccctcccacttttccttccttctctgttctctcactgaatttttatcttcctttcctttctgtaaagtttgaatcttttcaaattcagttgtagtcacacatcctttagaaagcattctatcactgttctccccagatttttagcttagttcgtatcatgaatacccatatattgatgagcaagtgtctgtgtcttctctacttgtattcaatttttcagtttagaaatacattttgagtccaagtaaacaaatcacaagataagattcttatctaattgaagctaaacattttttctttaggtgaacattttgaaatgactaaattcaatattttccacata

SEQ ID NO: 12258 - DNA, 3044 bp, Rattus norvegicus; identical to SEQ ID NO: 638
  ref <308>: DATABASE ACCESSION NUMBER: EMBL / AF030358
  ref <309>: DATABASE ENTRY DATE: 2000-03-03

SEQ ID NO: 12259 - protein, 393 aa, Rattus norvegicus; identical to SEQ ID NO: 639
  ref <308>: DATABASE ACCESSION NUMBER: SWISS-Prot / AAC33834
  ref <309>: DATABASE ENTRY DATE: 2002-06-15

SEQ ID NO: 12260 - DNA, 3310 bp, Homo sapiens; identical to SEQ ID NO: 640
  misc_feature (1)..(3310): n=a, c, g or t
  ref <308>: DATABASE ACCESSION NUMBER: EMBL / U84487
  ref <309>: DATABASE ENTRY DATE: 1999-07-02

SEQ ID NO: 12261 - protein, 397 aa, Homo sapiens; identical to SEQ ID NO: 641
  ref <308>: DATABASE ACCESSION NUMBER: SWISS-Prot / AAB49679
  ref <309>: DATABASE ENTRY DATE: 2002-06-15

SEQ ID NO: 12262 - DNA, 3044 bp, Rattus norvegicus; identical to SEQ ID NO: 638
  ref <308>: DATABASE ACCESSION NUMBER: EMBL / AF030358
  ref <309>: DATABASE ENTRY DATE: 2000-03-03

SEQ ID NO: 12263 - protein, 393 aa, Rattus norvegicus; identical to SEQ ID NO: 639
  ref <308>: DATABASE ACCESSION NUMBER: SWISS-Prot / AAC33834
  ref <309>: DATABASE ENTRY DATE: 2002-06-15

SEQ ID NO: 12264 - DNA, 3310 bp, Homo sapiens; identical to SEQ ID NO: 640
  misc_feature (1)..(3310): n=a, c, g or t
  ref <308>: DATABASE ACCESSION NUMBER: EMBL / U84487
  ref <309>: DATABASE ENTRY DATE: 1999-07-02

SEQ ID NO: 12265 - protein, 397 aa, Homo sapiens; identical to SEQ ID NO: 641
  ref <308>: DATABASE ACCESSION NUMBER: SWISS-Prot / AAB49679
  ref <309>: DATABASE ENTRY DATE: 2002-06-15

SEQ ID NO: 12266 - DNA, 1188 bp, Rattus norvegicus
  ref <308>: DATABASE ACCESSION NUMBER: EMBL / AF034896
  ref <309>: DATABASE ENTRY DATE: 2000-03-03
acgtgatgggatcagaaattcatgtaccctaaagttatacctaccaacttctatacacatgtcagttcctagttccagatgaaggtcttccaagcagcactgtcagtcactgaacatccctcctgaaaccctcagatgctttgtttgtaaccatgtaaatttatgcgtgagcccattccacagagcagacatgttctaaaagaagaggggaaatgcttagagatgagtgtcaactgttctctgtggcaggagaatagtttgtctgtcaaacgctttgcatttgccaagttctctgaggtccctggagaatgcttcctcctgttcaccctcatccttctcatgttcttagtatcactaacaggaaatactctcatagcccttgctatttgtaccagtccatctctacacacccccatgtacttctttctggccaacttgtctctcctggagattggctatacttgctctgtcatacccaagatgctgcagagccttgtgagtgaggcccgagggatctcttgggagggttgtgcctcacagatgttcttcttcatattctttggtataactgagtgctgcctattggcagccatggcctttgaccgctatatggctatatgttccccactccactatgcaacccgaatgagtcgtggggtatgtgcctatttggcaattgtctcatgggtgatgggatgcatagtaggtctgggacagaccaattttattttctccttgaacttctgtggaccctgtgagatagaccacttcttctgtgaccttccacctctcctggcacttgcctgtggtgatacatcccaaaatgaggctgccatctttgtggcagcagtgctctgcatatttagtccatttttactgatcatttcttcctatgtcagaattctcgttgcagtgctggtgatgccttcacctgaggggcgccataaagctctctctacctgttcatctcacctacttgtagtcacactcttctatggctcaacatctgccacctatttgaggtccaagtctagccactcaccaggagtggacaaactcttggccctcttctatacatcagtgacatccatgctgaatcccatcatctacagcttaaggaacaaggaagtaaagggtgcactgagaagaactctgggcctgaagaaagttctgacaatgaaaaggtaa

SEQ ID NO: 12267 - protein, 341 aa, Rattus norvegicus
  ref <308>: DATABASE ACCESSION NUMBER: SWISS-Prot / AAD01991
  ref <309>: DATABASE ENTRY DATE: 2003-02-01
MREPIPQSRHVLKEEGKCLEMSVNCSLWQENSLSVKRFAFAKFSEVPGECFLLFTLILLMFLVSLTGNTLIALAICTSPSLHTPMYFFLANLSLLEIGYTCSVIPKMLQSLVSEARGISWEGCASQMFFFIFFGITECCLLAAMAFDRYMAICSPLHYATRMSRGVCAYLAIVSWVMGCIVGLGQTNFIFSLNFCGPCEIDHFFCDLPPLLALACGDTSQNEAAIFVAAVLCIFSPFLLIISSYVRILVAVLVMPSPEGRHKALSTCSSHLLVVTLFYGSTSATYLRSKSSHSPGVDKLLALFYTSVTSMLNPIIYSLRNKEVKGALRRTLGLKKVLTMKR

SEQ ID NO: 12268 - DNA, 921 bp, Homo sapiens; identical to SEQ ID NO: 732
  ref <308>: DATABASE ACCESSION NUMBER: Refseq / NM_013941
  ref <309>: DATABASE ENTRY DATE: 2000-11-02

SEQ ID NO: 12269 - protein, 306 aa, Homo sapiens; identical to SEQ ID NO: 733
  ref <308>: DATABASE ACCESSION NUMBER: Refseq / NP_039229
  ref <309>: DATABASE ENTRY DATE: 2000-11-02

SEQ ID NO: 12270 - DNA, 2896 bp, Rattus norvegicus; identical to SEQ ID NO: 722
  misc_feature (1)..(2896): n=a, c, g or t
  ref <308>: DATABASE ACCESSION NUMBER: EMBL / AF034899
  ref <309>: DATABASE ENTRY DATE: 1998-05-27

SEQ ID NO: 12271 - protein, 322 aa, Rattus norvegicus; identical to SEQ ID NO: 723
  misc_feature (1)..(322): Xaa=Unknown amino acid

SEQ ID NO: 12272 - DNA, 1990 bp, Homo sapiens; identical to SEQ ID NO: 724
  ref <308>: DATABASE ACCESSION NUMBER: EMBL / L35475
  ref <309>: DATABASE ENTRY DATE: 1999-07-02

SEQ ID NO: 12273 - protein, 316 aa, Homo sapiens; identical to SEQ ID NO: 725
  ref <308>: DATABASE ACCESSION NUMBER: SWISS-Prot / Q15062
  ref <309>: DATABASE ENTRY DATE: 2001-10-16

SEQ ID NO: 12274 - DNA, 2896 bp, Rattus norvegicus; identical to SEQ ID NO: 722
  misc_feature (1)..(2896): n=a, c, g or t
  ref <308>: DATABASE ACCESSION NUMBER: EMBL / AF034899
  ref <309>: DATABASE ENTRY DATE: 1998-05-27

SEQ ID NO: 12275 - protein, 322 aa, Rattus norvegicus; identical to SEQ ID NO: 723
  misc_feature (1)..(322): Xaa=Unknown amino acid

SEQ ID NO: 12276 - DNA, 1990 bp, Homo sapiens; identical to SEQ ID NO: 724
  ref <308>: DATABASE ACCESSION NUMBER: EMBL / L35475
  ref <309>: DATABASE ENTRY DATE: 1999-07-02

SEQ ID NO: 12277 - protein, 316 aa, Homo sapiens; identical to SEQ ID NO: 725
  ref <308>: DATABASE ACCESSION NUMBER: SWISS-Prot / Q15062
  ref <309>: DATABASE ENTRY DATE: 2001-10-16

SEQ ID NO: 12278 - DNA, 2896 bp, Rattus norvegicus; identical to SEQ ID NO: 722
  misc_feature (1)..(2896): n=a, c, g or t
  ref <308>: DATABASE ACCESSION NUMBER: EMBL / AF034899
  ref <309>: DATABASE ENTRY DATE: 1998-05-27

SEQ ID NO: 12279 - protein, 322 aa, Rattus norvegicus; identical to SEQ ID NO: 723
  misc_feature (1)..(322): Xaa=Unknown amino acid

SEQ ID NO: 12280 - DNA, 1990 bp, Homo sapiens; identical to SEQ ID NO: 724
  ref <308>: DATABASE ACCESSION NUMBER: EMBL / L35475
  ref <309>: DATABASE ENTRY DATE: 1999-07-02

SEQ ID NO: 12281 - protein, 316 aa, Homo sapiens; identical to SEQ ID NO: 725
  ref <308>: DATABASE ACCESSION NUMBER: SWISS-Prot / Q15062
  ref <309>: DATABASE ENTRY DATE: 2001-10-16

SEQ ID NO: 12282 - DNA, 2896 bp, Rattus norvegicus; identical to SEQ ID NO: 722
  misc_feature (1)..(2896): n=a, c, g or t
  ref <308>: DATABASE ACCESSION NUMBER: EMBL / AF034899
  ref <309>: DATABASE ENTRY DATE: 1998-05-27

SEQ ID NO: 12283 - protein, 322 aa, Rattus norvegicus; identical to SEQ ID NO: 723
  misc_feature (1)..(322): Xaa=Unknown amino acid

SEQ ID NO: 12284 - DNA, 1990 bp, Homo sapiens; identical to SEQ ID NO: 724
  ref <308>: DATABASE ACCESSION NUMBER: EMBL / L35475
  ref <309>: DATABASE ENTRY DATE: 1999-07-02

SEQ ID NO: 12285 - protein, 316 aa, Homo sapiens; identical to SEQ ID NO: 725
  ref <308>: DATABASE ACCESSION NUMBER: SWISS-Prot / Q15062
  ref <309>: DATABASE ENTRY DATE: 2001-10-16

SEQ ID NO: 12286 - DNA, 966 bp, Rattus norvegicus; identical to SEQ ID NO: 730
  ref <308>: DATABASE ACCESSION NUMBER: EMBL / AF034900
  ref <309>: DATABASE ENTRY DATE: 1998-05-27

SEQ ID NO: 12287 - protein, 321 aa, Rattus norvegicus; identical to SEQ ID NO: 731
  ref <308>: DATABASE ACCESSION NUMBER: SWISS-Prot / AAC17224
  ref <309>: DATABASE ENTRY DATE: 2003-02-01

SEQ ID NO: 12288 - DNA, 921 bp, Homo sapiens; identical to SEQ ID NO: 732
  ref <308>: DATABASE ACCESSION NUMBER: Refseq / NM_013941
  ref <309>: DATABASE ENTRY DATE: 2000-11-02

SEQ ID NO: 12289 - protein, 306 aa, Homo sapiens; identical to SEQ ID NO: 733
  ref <308>: DATABASE ACCESSION NUMBER: Refseq / NP_039229
  ref <309>: DATABASE ENTRY DATE: 2000-11-02

SEQ ID NO: 12290 - DNA, 873 bp, Rattus norvegicus
  ref <308>: DATABASE ACCESSION NUMBER: EMBL / AF035822
  ref <309>: DATABASE ENTRY DATE: 1998-11-11
gaggcgaggagtcggtagcccagcgccgcccgggactcactgtggccgcgcgccactacttccgaggttcaggccgtcgccggcaccatgtctggctatcctaaaagctataatcctttcgacgatgatgtggaagacgaggacacccggccggcgccgtggaaggacgcccgcgacctgcccgacggccccgacccgcctattgacaggcagcagtacctgagacaagaggtgttacgtgggccgagcgctactgctgccagcaccagcaggtccttgttcctcatgtatgaatcggagaagatcggagtcgcctcttcagaggagctggtccggcagcgaggagtcctagaacacacggagaagatggtggacaagatggatcaggacttgaagatgagccagaaacatatcaacagcatcaagagtgtgtttggaggattcatcaactacttcaaatccaaaccagtagagcctccacctgagcagaatggcagcatcgtcccccagcccagcagcagattgaaagaagccataaatacaagtaaagatcaggaaagcaagtaccaagccagccacccaaacctcagaaggctacatgatgcagaactagactctgttcctgcttctactgtgaatactgaggtttacccaaagaactcaagccttagagcttatcaccagaagattgacagcaacctagatgagctgtctgtgggattgggccgcctaaaggacatagccttaggaatgcagacggaaatcgaggagcaggatgacatccttgaccggctaacaaccaaagtggacaagttagatgtcaatataaaaagcacagaaaaaaaggtgcggcaactctagagacacgaagac

SEQ ID NO: 12291 - protein, 257 aa, Rattus norvegicus
  ref <308>: DATABASE ACCESSION NUMBER: SWISS-Prot / AAC72291
  ref <309>: DATABASE ENTRY DATE: 2002-06-15
MSGYPKSYNPFDDDVEDEDTRPAPWKDARDLPDGPDPPIDRQQYLRQEVLRGPSATAASTSRSLFLMYESEKIGVASSEELVRQRGVLEHTEKMVDKMDQDLKMSQKHINSIKSVFGGFINYFKSKPVEPPPEQNGSIVPQPSSRLKEAINTSKDQESKYQASHPNLRRLHDAELDSVPASTVNTEVYPKNSSLRAYHQKIDSNLDELSVGLGRLKDIALGMQTEIEEQDDILDRLTTKVDKLDVNIKSTEKKVRQL

SEQ ID NO: 12292 - DNA, 2863 bp, Homo sapiens
  ref <308>: DATABASE ACCESSION NUMBER: Refseq / NM_004782
  ref <309>: DATABASE ENTRY DATE: 2002-11-05
ggagttcgcgcgacgaccgcggggtcggcgggcggggcgaggccctggacggcggcggcagtggggctcctccttctgtttcccagaccgagagccgcgccggcaccatgtcagcttaccctaaaagctacaatccgttcgacgacgacggggaggacgaaggcgcccggccggccccttggagggacgcccgagacctccccgacgggcccgacgcgcccgcggacaggcagcagtacttgcggcaggaggtcctccgcagggctgaggccacggccgccagcaccagcaggtccctggccctcatgtacgagtccgagaaggttggggtcgcctcttccgaggagctcgcccgtcagcgaggagtcctggagcgcacagagaagatggtggacaagatggaccaagatttgaagatcagccagaaacacatcaatagcattaagagcgtgtttggggggctggtcaattacttcaaatccaaaccagtagagaccccacctgaacagaatggcaccctcacctcccagcccaacaacagattgaaagaagctataagtacaagtaaagaacaggaagcaaagtaccaggccagccacccaaaccttagaaagctggatgatacagaccctgtccccagaggggctggttctgccatgagtactgatgcttacccaaagaacccacaccttcgagcctatcaccagaagatcgacagcaacctagatgagctgtccatgggactgggtcgtctgaaggacatagccctggggatgcagacagaaattgaggagcaagatgacattcttgaccggctgacaaccaaagtggacaagttagatgtcaacataaaaagcacagaaagaaaagttcgacaactctgaagacagacggatttccactctattgtgatgaaaagatttgaaagatctttttttgaacttccaagaaatttcatttactattttagtatgtaaattaatgtgtgtttgcaaatgttataatagagtaggtcttaagacatttttgctgttataaggaagtgtttgtcccacattttcctagggttaacacctcaccaagttcttccagcaaaatgcttattagagtttttgtctgagcacagtagcctggccctgcatatcttgggcgtttgattaccatgctggaataagaagagttgcatttctcattttaatgagcatatggaaagatgggaacagaatttcagtcttgcagccatgagcctctatttctcattcctaagccttaccatgagtcagagtgttaagggggcctgtgagccagtcgtttggtggaggagggtccttcccacacctttgtttaggagtcatcattcacacacacacacacacacacacacacacacacacacacactctgagcacattatctgtgattctttcatcctcccagaaaggatcagtgttagaatgggaaatagagtgtgccatcttgctcttttgttggcagatgtccccgcttccctccagccccccatccttggcatgtatattagtaggagggcttcacaccagcactgctcactgcgactcctggaaatgtgtggggaattgggtgagcccctcttccccacgtgctcccatctgtaactctccatctgtgatttgcaacaggtcttccactggctcgaggctgcgaggctgaccgacaggggcgcccaatagagtttgtgggaatggagtattgcacagatgcagctgcacaatggtcttcctccacccctctgggaatcaccattaggcaggcctcagtagggcaaaatgtttatttggtaccgggggtctcctgacctgtctagcattcccacccactcttctgcacttcttgcaaggtaacttgaatcatcacttatttctctgccacctggttttaggactggcactctataaatgacgctgactttgtatagaaggattttgctaagggggcaaaaagcccagataccattttaactggcccagctcattttctcctttcattttacaaaagaaatcatgcagaagcatcaattaaaactgatttatttatgttggtacatccaacaaaatagttggagccacaaggcccttgtctttttaaaaaaacaaaatattttgaagatggtgaaagtgactgattttaataatgagataggtcacttaaaataacagtgcctttgaccttaaaacatggcactggcccatgtgacctttgccatttcccagtacttccctttacagtctgcagcctataaacagtggtgtctcaaagcaaaggaaacctccacaagtgctgcaacagtgcattagtttttatgtagcaatttgtttataaaaattcccatcccataatgcatgaccttcctaaaaatacccacagcctccataggcaaggtgagctttctgtgctacccactggttagattccagccacctcagggattctgatccatgtcattaacgaccatcccagggtgtgagggcctgattaaagcttatcgaactagacatttgtttattagatgagctcggcattattattttctcaataactggtagaagggaaattttaaacataacactcaacccaaacaaaactacttcgtgaggctttcagcaaaaaggctgcttaaaagcatgaacccgggatgcagagcagcttttgtgcacggttccacttactgtaattgtttctggttctttcctctaacaccttccatgtatgtcaactttttatcaccgtcaggcatagactcgtggagattagtcattatagctcagacctaagctaattatttaaaataaatacatgtaaaggccactgccacattctcagcaga

SEQ ID NO: 12293 - protein, 258 aa, Homo sapiens
  ref <308>: DATABASE ACCESSION NUMBER: Refseq / NP_004773
  ref <309>: DATABASE ENTRY DATE: 2002-11-05
MSAYPKSYNPFDDDGEDEGARPAPWRDARDLPDGPDAPADRQQYLRQEVLRRAEATAASTSRSLALMYESEKVGVASSEELARQRGVLERTEKMVDKMDQDLKISQKHINSIKSVFGGLVNYFKSKPVETPPEQNGTLTSQPNNRLKEAISTSKEQEAKYQASHPNLRKLDDTDPVPRGAGSAMSTDAYPKNPHLRAYHQKIDSNLDELSMGLGRLKDIALGMQTEIEEQDDILDRLTTKVDKLDVNIKSTERKVRQL

SEQ ID NO: 12294 - DNA, 1498 bp, Rattus norvegicus
  ref <308>: DATABASE ACCESSION NUMBER: EMBL / AF039212
  ref <309>: DATABASE ENTRY DATE: 2000-10-26
ctcgaggatctacaagatccatccacagcaccaggaagagtatactaaaaaagaaagtaaaaatagcttcagagtggacgtggagaccagaccataattcaggcctggtgggaaattaaaatgatacagccctgtgtagagctgtctgatgtcttagcagtgaacactagaatttcctcatgagctagcagccctagttgcaggacttgagatcacttcctgagaagaacctgcatgtggcactaatggcagctctattcaaagtagccacaaggtgaaaacagccctgcagatgctgcaaaaccatgggagacagagccatagctctgtgaagttccctgggtcactaaggggcatcacagtagagctctctgcttctccatagaatatgtctgcctatgacttcgggtgcatcagaggggatgttgttaggaggtagatgttcaccttccttcaagtccctggggtggttgtcagtctcagtctcatttgagcaagtcagaagacagagtgtctggaaatggaacaagaactgcactgcacatgctcagagacagcaggatggctcatctggccgacttggttctatgtgtgaggaggaggggcaggttcaggaacttcccctgagccttggaagcagaagcagcaaatcgctttggaagagagtctggtatcctatagaaagtgtccagacttttgctttgagtctaattctagaaatgtaggcttctttgaaacttgcttccttttgtaaaatcatttggactccttagagtcaagtatatttcctcacaactccttctacgctcacattgtgtgattctgcccaagaaaaggctcacaagcccttctgttcaggacaacaaaagagcatgttttaatgatgattactcaattattactgttctcccaagtaaatcattgccaggaactgctatgtgaggacacgccctcttgagggggcagatttctcactgtctcacacttcctctgctgtgttaggagagcacagtctcagcagctgtcttgccttggtctgcacttctcccatggctcctgcagacattccagcctctcttcctctcggtctgtgcctgctgctggcctctggctttgggcatgcaggcaagctgctggtggtgcccatggatggcagccactggttcaccatgcagatggttgtggagaagctccttcccaaaggccatgaggtggtggtggttgttccagaggtcagttggcagctgggaaaaccactgaattttacggtgaaaacgtattcagtttctcacactcaggaggatttaaatcgggagttcaagttttttattgattctcagtggaaaactcaacaagagggcggagttcttcctctactgactagccctgcccagggtttcttcgaattactgttttcacactgtaggagtttgtttaaggacaagaagttagtggagtacttgaagcagagttcgtttgatgctgtgtttctggatcc

SEQ ID NO: 12295 - protein, 531 aa, Rattus norvegicus
  ref <308>: DATABASE ACCESSION NUMBER: SWISS-Prot / AAB94937
  ref <309>: DATABASE ENTRY DATE: 2003-02-01
MAPADIPASLPLGLCLLLASGFGHAGKLLVVPMDGSHWFTMQMVVEKLLPKGHEVVVVVPEVSWQLGKPLNFTVKTYSVSHTQEDLNREFKFFIDSQWKTQQEGGVLPLLTSPAQGFFELLFSHCRSLFKDKKLVEYLKQSSFDAVFLDPFDVCGLTVAKYFSLPSVVFSRGIFCHYLEEGSQCPSPPSYVPRGILKLTDTMTFKERVWNLLSYMGEHAFCPSFFKTATDIASEVLQTPVTMTDLFSPVSVWLLRTDFTLELPRPVMPNVIHIGGINCHQRKPLSKEFEAYVNASGEHGIVVFSLGSMVSEIPEKKAMEIAEALGRIPQTVLWRYTGTRPSNLAKNTILVKWLPQNDLLGHPKARAFITHSGSHGIYEGICNGVPMVMMPWKTPLKLSSITRVTRRTSCASPAFTRTVLSLFGHQMDNAKRMQTRGAGVTLNVLEMTADDEPLDLAVFWVEYVMRHKGAPHLRPAAHDLTWYQYHSLDVIGFLLAIVFTVVFIVYKSCAYGCRKCFGGKGRVKKSHKSKTH

SEQ ID NO: 12296 - DNA, 31737 bp, Homo sapiens
  ref <308>: DATABASE ACCESSION NUMBER: EMBL / AF297093
  ref <309>: DATABASE ENTRY DATE: 2002-02-09
ttgcagtttgatctcagactgctgtgctagcaatcagcgagactccatgggcgtaggaccctccgagccaggtgcgggatgtaatctcgtcgtgcgccgttttttaagcccgtcggaaaagcgcagtattagggttggagtgacccgattttccaggtgccgtccgtcacccctttctttgactcggaaagggaactccctgaccccttgtgcttcccgactgaggcaatgcctcgccctgcttcggctcgcgcacggtgcgcgcacccactgacctgcgcccactgtctggcattcgctagtgagatgaaccgggtacctcagatggaaatgcagaaatcacctgtcttctgcgtcgttgctcacgctgggagctgtagacctgagctgttcctattcggccatcttggctcctccctctgttttctggactagattgtgagaaactggtattatttcttccttcagtgtttggtagaatttatcagtgaagtcatctgaactttacctttttgtttctgggagcatttgaattcaaaattcaatttgaatttaaaaggtacagattatgtcatttgtgttattaatttcttcttgtgtaaagtctgacagcttgtgtcttttaagaaatttgtccatttcatataagctgtagattttattggcatgaatttgtccatattctcttatcattttaatacctgtagaatctatggtgatactacctctcccattcccggtattggtaatttatatcttctgtcttttttttccaatcagcctggctagacattggtcaggttaattgatctgccccaaaagtgagctttggtgtcattggttttctccattgtttttctatttcctatttcattgatttctacactgaagttagcctccagggaaggtagatcactcactgtcatgtttgtttttcaaggacagtcatctaccagtgcgccagtcaccaagggacaggtgactaaacaatgtctagtacccattaatgtgtcctggagggagccatcttgtgctcctacaagaattatgccctgaggttggctgctgattccctcactaaatgttcctcagggtgttacctcacacacactgctgggctaatccatggaaatctccatgatgtaattcagcccaatgcaacaagaattccgtgaacttcctctatgccaagtatagcatgggtgctgtggaaggaggatgaaaataggaagaagacataacctctgtcttcaaggggtgctcaggatactgggggtgaccaatacatattcctgaaacaaggcaccagaccgatggggtgagcccacagcagaggcctacagctctgtttagaatgaggaagcagagcaggctgagagaggcagctcagcagagtgcttaggcaagcatagggccacgactccccactgcaggcaacatatctgaggaaagccatttacaataggtgatggtcacattccatcaaatctctggaagggttcatggaggtggggttttcaatcttatttcagcctttcaaaggcctctcagggtttggaaatggaagcaacaatgtctgtgcattgcagagacacaggtgagcccccatttcctgccagttaggaagtcagtgctgagggccttactgtatgtccttggcacatgagatgccagttcctttctgggcagagagcttttggttgtctgaggataacattgaaactttgctttgaaatgcatttcaaaaatatgaactttattcaaatttactttccttttttcattctgaattcttaaggtccaaaagcattgctgaataattctgcttctaaacccccattgcagcacagggcatgaactgtccccagggcaaagaacataaggtagtcttgtgtggaaaacatacaagtaggtatctcagcaaatgctacctactgtatcacagtagcttagaatcacagctgctcactctgggctgaagttctctgatggcttctgcagggtggactggcctccttccccctatatgtgtgtctacggctgacctgtggctttgccgaggctgggaagctgctggtagtgcccatggatgggagccactggttcaccatgtggtcggtggtggagaaactcattctcagggggcatgaggtggttgtagtcaggccagaggtgagttggcaactgggaagatcactgaattgcacagtgaagacttattcaaccttatacaccctggaggatctggaccaggagttcatggcttttgccaatgctcaatgggaagcagaagtacgaagcttattttctctattaatgagttcatccaaatgtttagaatttaatttttcacattgcaggagtttgtttaatgactgaaaattagtagaatacttaaaggagagttcttttgatgcggtgtttctggatcctttagctatgtgtggcttaattgttgccaaatatttctccctcccctctgtggtcttcaccagaggaatactttgtcattatcttgaagaaggtgcacagagccctgcttctctttcctacagccctagatatgtctcaggattttcacatgccatgacttttaaggagagagtatggaaccacatcttcttcttaaaggagcatttattttgcccatattttttcaaaaatgccttaaaagtagcctctgaagttctccaagcacctgtcatggcatatgatctctacagccacacatcaatttggttgttgtgaatggactttgttttggagtatcccaaacctgtgatgcccaatatgatcttcattggtggtatcaactgcaatcagggaaagccagtgcctatggtaagtcgttgctcctttagcacattaaaagtattctggatttgaatatttaaaaagatttcttactgaactgggatttgacatttgtgtttattgcatctaaaatttcttttctatgtaaaaaattattttgtgccttccacatgcttgttagttagcaacttttatataatggcctcattaatatgtatgtctatacagttggttggttaattgttcataatttccactgcattttttttttttttttttttttagaaacacggttttgctatggtgccctggctagactcaaactcctgggctcaagtgatccccctatgtaagccttccaagcaattatgacctttttagtatttttggaaaaatacttaaaaccacaataagaaatgaaactttcattttagctaatcctgtaatacctgctacagtaaaatgctctttgcagttttgtatgcatgtgtttccatttattgaaattactttatatataagcatatatgtaaatgtttacacttattttattaaaatcaaatctatcaggctggacatgttgtctttgccatgattttttacttgccagtaaatcagagacaactttacagatttgatatgttcttttaataattgataaaagtctttactttggatgcaacatagttgcaagctttcccagatgtttttctgctaaagatttggctaacttcttcaaaacaacaataataaacagatgttgtctttctttgaccctgaagaaagtataaagcaaaatgcctttagccacccaaaacagtgttaccatgacgtttggtctcgtccagtctgcttttgatttgactggatcgctttcgtttcttggtagccattgctttgattgtgctttgtcttcagggtcttactggtaaagctatgtttcatctcctgttacaattctttgaagagatgcttcaaggtctggatcccacttgtttataatttccattgaagggtctgttcttgtctgcagatgatctggctgtaacggttttggcacccaacaagtggaaaatttgttcaactgaaatttttgtcagaattgtttaaactgatctgattgaaatttctgttgtgttggctattgtttctgctgttaattgtcagtcctcttcagttagagtatgagcaagattaattgtttccttgtgaattgatgtatggatggtctgctggtgtgggcttcatcttcaccatcatcttgtcccttcttaaaaggaattgcccatttgtaaactgctaattttttggagcattttccccattaactttctgtaaagcatcagtgatttcaccgttcttccctcatgtctcagcataaattttaggctattgcttcaattgtagcagaattcatgttgttttgatggggacttctttccaactgatgtcttatccttcttagtgcctcaaactagatcctactcagacatgttttaacaagttagcataagtttgttttggtgcaaagaaatttgaaatccatgcttaagtttttcataatatgcattttcattaatcgtgtgatgatccctcatctattacttttatagggatgggccacgcatttttgttcattgttctggcttcttacaaggttcagtagactttgtaacacagttgtgtctctcacagattggcagatgtttggtaaaggattgacttttcagccaactcatgggaaagtgaaataatgtaaaaaacaggaagaatacagttttaggcctttcaagtgaggcatggctttcagctcttggcaagaacaggcaaggagatgcaagttttaggactctaagaggctaggcttttcaaagtgcttctctccccttcaccctccttcagttacagcaccaagcaccaccgaggtgttacctgcagcctcactctctacctggttgtgggatcctgccacttccttaacccacactgagttccttgtggttcacagggtcacacagagggctgtagagatacgaaagatatatgtgattttatatcacctatcatatgaagatatatttataaaataggaaacatattaaccacttatcattttatatatttatggttttatgtgtcaaaaatatattgtttcatgtatgtattaaaggataagtatgtataagaggttttatagatgtgtaaaattatatatttatacgtatctttacaaatttaagaataaaggaaggaaaattctcaaagaggaattcagatatcaagcagtgccctttgaccaagagccttggttacaacatacctacaaaagtgaactatcattgaaagacctatggacactggatttctctttccttatttagaagggcagtctgtgtcttggaaaagcatacagtttgttgtatcttgctggacaacaggagtcatagtctgaagtgtctgatgagaaggaagcatcacttgatgcagtgtgcatctgtgcccatgtatgtgcacgtgtgtttgtgtgtgtgcatgcacacatgtgtctgcatgcagtgtctcagatcctacataggggtttttcctgaaggtctccagtagcaaaaactcattgagtctatccaggggaattacatccaatgccgtaattaaatactttaatgaagatggcagatcatcattcaagagaacatcaggataattttaattgaaaaaaagaaaaaaggaatcactcccagggttttttagtttttggtgagttccagcagaattgatgactaggtccagtaggaaggaattcaggattactctgtaccatccagggtgagtgtagctctgaagaactgcgggtgggaagtgacttcacagcaagaaaagatctgggcttcccccattgctctaagatctggttccattgtgagattcaaattaagagtaagctgttaatgggcaagcccaaggtctcccaccaagattattcaattcaacttcttttttttttttaatcaaacatatggcaaggagagactatagtgtgatgaacacctatatatccatctttgtgttacataattttcaatattttattatactgattcatgtatctgctcttttgtttcttttttaaaaaaacttctggctataattttttaatggaaatgctgtacatatcattctatccccaaatacttcactaaatatgaaaaataaggaaattctgttacatagccacaatatcattatcattcctcacagaatcaatacctctttaatattgtctcactcataatctataatgaaatttcccctaattgtctcaaaaatgtcttttacatgcagatcagtagaatggagttgagaatccagaaataaacccatacatccttggccaattgatttttactgtggtgccaagactgttcaaatgggaaagaataatctcttcaacagaggtcactgcaacagctgcatatccacatgcaaaataatgaagttgcacccttatatgcaaaaactaacttgaaatggatcaaatagctaaatagaaaagctagaagtgtaaaagtttagaaggaaacatttgggcaagtattaatgacctggatttctgggatgtgacaccaaaagtatcagaaacaccaacaaaaacaacacagacatatttgacatcaaaataaaaaactttcgtgcatcaagggacactatcacgagagtgaaaagacaactcacatggcttccctcgctaagatgtgcaaacaaacgtatacatgcttgacatggaggctcctgggaggcgatcacaatcctcaatgacctgaagtcccaaaatcttgaatgttaagatcctgaaagatcaatgtcccacaaatataattccagaaaaaataactttaaaaattctttaaaagatatctgtttacattttaaatggggatttatttgaaaaatatataaaaacaggacagaacacttcataggccactttacaccctaaaatatataataataatacatatttttgcaagcttaaaccctcaggtgtactaatgactgtcacataggtgtatcacttgtgagcagatgaatcatattcatagaataacaggtcaaaaaaagaaaagtataaacatatatcattgtggttggtaattgtgtgcactcagctttacagctctgatcatctgacataccttgaaaaatgaacagagacttttcatgaggtcagtcaaaaacctctatgggtcaccaccacatacacagttgctcaaagtgcccaagtcttgagagcctcaccctcacacgtagctgggattacaggcatccaccaccacacctggcaaatttttatagttttagtagaatggggtttagccatgttggccagcttggccttgaactcctgacctcaggtgatccgcccacctcggcctcacaaagtactgtgattacaggcatgagccaccacggccgcctgagaaattttatctttcacaaatacagatatacaaaagatatacatctcttcatttattgaggacgttacaacgtttttacatacatgcctaatgcttacacacggttaaccctttgataacgcactttcatggagtcaaatttgtgaccataaaatgaattcgaattctctaaaagtctccacacactttctgcctttggtattggaaatgatgtgcagatgaaatacatatagcatagcaaattgcaaaaagaatgctgacaatgtaatcctgtgaaaaaacctaaaaagaagaaaaagtaaaaggaaaaaactccaaattaacctatgctgtgattgtgatttttgggattttagctgttagagagtttagattttagggagttagacctttgggatttggatccttagggaattgatattttggaattcaacattcagaattatgggttttgggattatgtctttcaggattatgatccaaaccctatagcatcttgtttgttagcataacgtgtacaaattttagatacatctctgcaccccagcagagcatcacgaaattgagtagtttacagcacagcttcttaacctatctgtgactaaggaataacacaaaaagttttctgcaattcattatagatccatgtttttctgtaacatataaaaaaaaaatgctacaaagtgaaatgaaatcagactataaaatgcaaaacaacagaggattgcttggctgacagcaacaccaattgctacaggaatttctaagtatttcctgcagggtctgcacccgtgctgagatgggcgggtaacacaatgagctggaaaccataccttgagcagcactgttttagacccaatccaatggtgctatgtgagtagtgtttaatcagaaataaggctgggtgcagtggctcacgcctgtgagcctgaggtcaggagtttgagatcagcctggccaacatggtgaaaccccgtctctaataaaaatacaaaaatttgccaggtgtggtggcagtcacctgtaatcccagctactcaggaggctgaggcaggagaatcacttgcatctgggaggcggaggttgcagtgagccgagatctcaccactgcactccagcctgggtgagagagcgagactctgactcaataaataaataaataaataaataaaaataaaaactaaacagaatactttctgttttgttaaggtgctaaatacattgtcacaaacactgaataattagtgatcaccagggcaaagtctatcatcagctaccagttttccttataaccttgtgttttgggaacctagcaacccttctgcccactaaagtgataactcatgcaggtttgcccagaatattcccagtttaacactggaagtctcatgtcccgggagactcctcgttccccaaggagcagggacagcaggtcactgtcactggagcactggaagctggccacatcactaggagattcagaaggggcacgacttaaggaggctcatgcttctcttatcttctgctttctgctgtcatttccaatgggtgacaagttccttccacgcagaagccaggccaggagataaagtcatcttgtcctagaaaaactgttaagaaagaagggaaactgtctagtgtgtttcgccaaaagagtttcacagactcttctcttattggggatatgggggtggatgatcactgtcctggtctccctgaagcaaggacacctctctggcctcagggtgcctgtcaggcaagtctctcctgtccctggaggttcacagagccccatccctgcaagagcaatgctaagtggggttggctttgagccccagccattctcttaacaattcttttagttaagtatcagttccctcatccccccactccagcattttttgcctcttgctatgatcagttttctcactttcacttttacacctctgatcactgaaaaattacagaattataagtttggaaaaggagtctatatttcttggaaaaggttacaaccttcaaggtggccatctagctggctgggaagcatgacctctggcaaataccagagacaggcccttgaaaggagaagggatggggtaggagctttatgctgaacaaactgggtaaacatacatattcaccaggttacagaaggagctatgaatatttatgaaggccatcctgactcatgcgtattgaacacacatgcatgttacatatgacccatgttcaccctggggtggagacatcatatttaaatggattacaattaggccctatacatcaaaaggtcttttcagggcacaaaggcactcaaattcacagtctctgtaaattggccagaaccagtctgtgatcaccagtcactggtcttcttaccaggagaaagttactgaaatcagcctcttgtccaacgaaagctgtatttgtggcttatggaacaagggatgggcatcagttagcatctggtggagctgcacttgtttaacattgtttttctctagacctgtgcttatttagctgctagagaaaaagaaaaactctgtggcagtcagaacatagttgattctttaagtgtaggcgcccatgactcaactcttgcttggcgtggcttgaggtcttgtgtgtagtttggtatctgatggccacaaaaagtccattgtatccgtctcatctctattttaacattaaagcgggtcagttgtgtttataccacaaaagggagggagtgtgatgaggcgtgtccaggcttctgttctgtcgtggctgtgactcagttttggtttctctggggtctttctggccaggaggggtccattcacttgttgtgggagacgggcggcacttagtattttcttttccgtttacaccttcctgggcatctgcattaagatgtgcagatacaccagcatgacacatgtatacatatgtaactaacctgcacattgtgcacatgtaccctaaaacttgaagtataataattaaaaaaagatgtgcagataaacacgcatatgcttcatgtggcagctcccttggttaaacattttttttttcctttcctatgagacttcctgaacaagtgagcccaggtggaacctctgcctgtgttaggacctaacctttctgtggctttctggaatccctggtgtcagaggtcaagtgtggattactgctgcttcccctcaccatcttctcctttccttcagtctgtcctgacaatgtgataccccacaggatacactgcctctttggcccactcaagggggcattttggtgatgccctgtggcctgcaggcccccaccagctatcacggtccccatcatcttgccttccctggctcacaggctttattttatgccactcttcatccctcctctgtgcagctcccgttttccttttctctccttcttccttttctctatttccttccccaccaatttctttccctctgtcacttcctcagcgtgatccctgttccagaggtataggatgatatggtttggctgtttccccactcaaatctcctcttgacttctagctcccataattcccacgtgttgtaggagggacccagtgggagataattgaatcatgggggcagttttccccatactgttctcatggtagtgaattcatctcatgagatctgagagttttataagggatttcccctttcccttggctctcattctctctcctgcctgctgccacgtagacatgcctttcgccttcagccttgattgtgaggcctccccacccaagtggaactgtgagtccattaaacctcttttcaaaaatgtaatttatccggtcttgtatctctttatcagcagtgtgaaaacagactaatacagtaaattgatcccagtagagtggtgtgctgctctaaagatacctgaaaatgtggaagcaactttggaactggataacaggcagaggttggaagggtttggagggctcagaaggaaacaggaaaatgtgggaaagttgggaactttctagagacttgttgaatggctttgaccaaaatgctgataatgatatggacaatgggatgagaaacttgttgtgaattggagcaaaggtgactcttgttatgttttagcaaaaagattggcagcattttgcccctgccccagagattggtgggactttgaaattgagggagatgacttaaggtatctggcagaagaaatgtccttttttttctttttttttaagatggagtgtcgctgtgtcgcccaggctggagtgcagtggtgcaatcttggctcactgtaacctccgcctcccaggttcaagcaattctcctgcctcagcctcctgaatagctgggattacaggtgcacaccaccatgcccagctaatttttgtatttttagtagagatgggtttcaccatgttggtcaagctggtctcaaactcctgacctcgtgatctgcctgccttggcctcccaaagtgctgggattacaggcatcagccactgtgcccggccagcaggagaaatttttaagcagcaagatattcaagaggtgacttgggtacagttaaaggcattcagttttaaaagggaaacagacataaaggttcagaaagtttgtagtcaagcaggctgcagaaatttgcataagtaataaggagccaaatgttaatccctaatacaatggggaaaatgtctctagggcacatcagaggtcttcatgtcagctgctcccaccataagcctagatgctcaggaggaaaaaatggtttcctgggctgggcccaggacacccctggtgtgtgtagcctagggacttagtgccctgtgtcccagccactggtgcatctcagtccctggcttcagagggtgcaagtccctggcagcttccacgtggtgttgagcctgcgggtgcacagaggtttggtaaactctgcctagatttcagaggatgtatggaaacacctgaatgtccaggcagaagtttgctgcaggggcggcccctcatggagaacctctgctagggcagtgcagaagcaaaatgtggagttgaagtccccacacagagtccccactggggcagtgcttagtggagctgtgagaagagggccaccatcttgcagactccaaaattggagatccaatgactgcttgcacctggaaaagctgtagacacttaacaccagcttgtgaaagcagccgggagggaggctgtactctgcaaagccacaggggcggagctgcccaagaccatggaaacccacctcttgcatcaacatgacctggatgtgagacatggagtcaaaggagatcattatggagctttaaggtttaacgactgccctattggatttctgacttgcatggggcctgtggcccctttgttttggccaatttctcccatttggaatgggagcatttacccaatgcctatactctccttgtatccaggaaataactaacttgcttttgagtttacaggctcataggcaaaagggacttgccttgtctggaatgagactttgaactgtggccttttgagttagtgctgaaatgagttaagatttaggggactgttgggaaggcatgatttgttttcacatatgaggacatgagatttgggaggagccagaggtggaatgatatggtttggctgtgtccccacccaaatctcatctttaatttgagctccctaattctcgtgtgttgtgggagggacccagtgggagataatttaatcaagggggtggttttccccatactgttctcctcgtagtgaataagtctcacgggatctgattttataaggggtttcccctttcacttggctctcattttctctcttgcctgccaccacataagatatgccttttgccttctgccaggattgtgaggcctccccagccatgtggagccgtgagtatctaagcagcaaagtattcaagaggtgacttggtgctgttaaaggcattccgttttaaaagggaagcagacataaaggttcagaaagtttgcagtcaaacaggctgcagaatttgcataagtaataaggagccaaatgttaatccctaatacaatggggaaaatgtctccagggcacatcagaggtcttcatgggagcccctcccaccactggcttagaagcttaggaggaaaaaatggtttcctgggctgggcccaggacacattaaatctctttttaaaaaataatttacccggcctcaagtatgtctttattagcagtgtgaaaacgaactaatacaggagtcatcaagaaaggtcagcttcttcatcaaggttggaggcagtgaaaacaacccgagttccagtcccttctgtgggacctagcttctcctcgctgtccccactttacatccatctgccctgcctgaagacccaccctggggtccttaagttccagcatcagacaccaaggcagtttgcagagatcatccagtcagctaccaccatgcatctggccaatccctcaccatgggtatgcacagcagctctgcttctctcactgaaccctgactgctataggtcggaagtaagggctgtggcaccgtggcaccttgtacactttttgacttgaaatgcaagaggcagaagggacaggagcaagaggagagcctagaccatggcctattacagtttttgtgggaaagacaggcagggcaggagaaagagtttaggactggctggtttggataatctcagtgggctctgagctataaggctgggccctttgctctctctaataattggctggcttggaaagggactccattctcagccagaaagggattttaagatgtggaaacatcataatatacagaaaattaacaaatacatgcaatacaggaagtatgctctttttttttctcatggataaatacctagcaatagaatagctgtgctttatgataggtatatgtttacctttttaagaaactgccaaacaatattctcaagtagctgtgccatcccaccaccaggatatgaacggaccagctcttcctgctcacaagcacctggtgttttagtctgtttgtgttactatgaatgaatacctgagactggctaatgtataaagaagagatgttcagccttcagttctgcaggctgtacaagaagcatggaaccaacatctgcataagacaatagagttagcctatcccttcctggcttaaatcctggtgcccacttctcttccttactaataaatgtcctttgtggcatttttttttctagatagggcacttttgcatgaattaaaaaccagtttgggcagatattctttctcctcgaagcttttcctcatgaattctgggaactcatctgctgcatatggcttctgttatcttgacatttttaaagccaaacctcttcctaaaactagcaaaccattctttgctgccattaaattctccagcttcatatccttcacctttatttagctttgtgttgttatataatgactttgtttttctcaggtcatagtagagaatgtaggtatgcctttcttgtaacaagcctgtgcccacataaaagctgcatttttataataaaattttatttagataagcatgatacagaattaatctttgacaacttatctatggatataatgactctagtttcagtctttttcttctgaaatatgtgagctttccccaacaatctggactgttttcctaccttaatattctacttttgctcttggatttgttgatagggtccagaggacttcccatggggctgtaaagaacttattcctccgtgtggactgtgcacaccgtggtgctgtcattactgttaccaccaagagactccttaaacacttaggatatatgagagtcttcacttggttaaaaaaatctgccagtttctcagaaagacctttctcactattaatctttaacccatggatggaatcctagatatttttatccattaactctttgaatatccttgtttctaccttggcagtggagtctactgagattgaaaagctgcatttttaatatgagataaaaaggtattttggaaaaagtgcaaggtttgaagcctgctggcctcactgcagtgatggcttagtgagttttcttttctttttttaacaatggtccttatctggtttcatttttttttttttaaatgatggccaaccacagctgcagtcctcaacctatggtacatgtcaagcaattcaactttcattataatatcatgaatttctttgcttcatgggagcacttgaggcatcactagtgacactttgtatgggcaccatggtattatttagggtttctgatatgcagcaaacatgacaaacaatgcatgagaactgtgagatcagtgtttactatgatacacaatttactggagggatgaactgcacacatggagatgatcagcctcacgtggcgttctgagtggatacttacaacacttgaactccctgcaatagcaacagggggtggctatgaaattatcgcaatagtacagtaggcacagttaactctatgcacttatgacttaatgctgcaaccttactttttttacttttctgttgactacaaatggtgtcatgtatagtctgtgtttgtgtgtataagttttgataaattttaactatttaaaatagatttgtgtccatattatggtagtaaatgataaaataaactagttactgtatatatcttatgcattcctgacacactaaactttttcttaattttttcactattgtaggctatgtggtttatctgcaagtcttttcaatttgttgcaaatctccataacattttctaatatatttattgcaacaaatctgcctataaatggaccaacaccattgaaactcttgatgttcatgaataactgtttatagaaatgaaattaacttttacttgttgtatcctgcagcaacgctaaacttacttatctattcttggaggttgttgtagtttgttggaaattccacatagatgatcacgttgtctgtgaatgagatctttttactttttctttcaaatctggatattttaaatttctttttcttgtttgactgcattgaataaaacaatgttgaatagaagtagtaactagccccccatccttggcatgtgtctgatctgaggagtggagctttcagtctttcaccattaaggatgatgttagctgtgggtttttctaagatgcccctgaatagttttggaaactttccctctttttccttcttttgctgataaatttttttgtcagatatggattttgaactttgtcaaacactttttctgtacctattgagatcattacatggttatacttttttagtttgtttatatggtatgttactttgatttatttttaaagattatttatcattcattatgttgaaatacgcatagcgtacacttatcatgttcaccactttaggtgcacagttcaatattgagtacattcacattgctctgcaaccaacaccaccattcatctgcagaactctcttcatcttcccaaactgaagcttgggacccattaaacaataattgcccattcccctctcctccaagcccttagtgtaatcacccaaggggttctccttgtctgctgcctagacagaactgatttatcaagacaggggaattgcaacagagaaagagtaattcatgtggagctggctgtgcagtagattggagttttattattactcaaatcgatctccctgagcaattcagggagcagagtttttaaggactacttggtgggttgggagaagccagtaagccaggagtgctgatcggtcagggatgaaatcttagggagttgaatctgtcttcttgtgctgagtcagttcctgggtggtggccacagatcagatgagccagtttatctatgtggatgctgccagctgatccatcaagtgctgggtctgcaaaatatctcaagcactgatcttaggagcagtttagggagggtcagaatcttgtagcctccagctgcatcaatcctaaaccatgatatctaatcctgtggctgatgttagtcctacaaatgcagtctagtccccaggcaagaaggaggtctgctttgggaaagggctgttactgtctttgttttataaaactataaactaagtttctcccaaaggtagttcagcctatgcccaggaataacaagcacaacttgaaggttagaggcaagatggagtcacttaagttagatctctttcactgtctcagtcataattttgcaaatgtggtttcattggcaaccaccattcctctttttgattctatcaatttgtctattttggatacctcatacaagtagaatgatatggcagttgtcatttagtgactggcttactttacttagcacaaagttctcaaggtttattcacggtgtagcacgtgtcagaatttcctccctctttaaggctgaattttactcctttgttaccacattttgcttatgcattcatctgcagatgggcacttggggtgagttcacctcttggctgttgtgagttatgcagctatgaacatggtggtacaaccttgattaattttctaaagttaagaccagccttgcatcccagggataaaccccgtgtgcttgtagtttatgatctttttatgtattatatacttaaaatattattgaatttgatttgctaaaatattgttttaaatttttgtttctaagttcatgagggtctgtagtttttctatcttatagtgtctttatctggttttgatattttggtaatgctagtcttttaaaatgaattaggaaattccataggcttttggtttctggactagactgtgaggatttggtattatttcttcctttattgtttagtagaatacattagggaagtcatctgaacttcacttttttggtgggaaagtttaaatttcaaattcaaattcaatttaaaagatattagttacttctatttgggttatttatttcttctagtgagaagattgggagcttgtgcctttaaagaaatatgttcatttcatctgtgttttagactttattggcataaacttgttcatgatattctgttatcattttaatatttgtagaatatatggtgataccacctctctcattactgatattgataatttatttcttctttctttttttctgatcagtctgctagatagagctttatcaagataattgatcttctcaaaaagccagctttggtttctttaattttgtctattgattttctgttttctatttcattgatttctgctctgaagtaagcctccagggaagataaattagtcactgtcatttttatttttcaagggcagccatctgcaagtgcctcagttaccaagttaaaaggtgactgagcaaatgtctagtatcagttagggtgtcctggaaggagacattttgttctcctacaagaactatgccctgaggtttgctgcagaatccctcactaaatgttcttcagagtgtaacctgacatgcactgctgagctcacccatgaaggtgttgagaaaacctgcaagatgtgattcagcccaatgcaacaagtattcccatggatttcctctgtgcaaggcatagcatgggtgcagtggaaggaggatgaaaacacaagacataacctcaacatgaagtactactcaggaaactggggcagaccaatacatatattcccgagggaggcacaaggccagtggaataagcccacagcagaggcctacagctctgttcagaatgtggaagcagagcaggcagagagaggcagctcagcagagtacttgggaaagcatagggccagtgactcctcactgcaggcaacatatctgaagaaagccatttacaataggtgacaatcacattctataaaaatccatggaagggtccatggaagcagggttgtcaatctcattatagcatttcagaagctaggaatggaagattaaaagcagcaatgcctatgcattgcagagatgcaggtgagtcacaatttcctgtcaggtaggaggtcaatgctaaggaccttactgtctttccttgggccatgaaatgccaattcctttctgggcagagggcatttggttgtctcaagctaaaatccacattttgctttgcatctgggcaatttacaaaagaaggaggtttattggacttacagttccacatggctggggaggcctcacaatcatggtggaagggaagaaggagcaagtcacatcttacatggacggcaccacccaaagagagctgtgtagggaaactcccctcataataccatcagatctcatgagatttatttgctatcaggagaacagcacgggaaagacctggccccatgattcaattacctccaccaggtccctttcacaatatgtgggaattcaaggtgagatttgggtggggacacagccaaaccatatcagggacaaattccaaaaacattagctttattcaaatttactttcctttttacctttctgagttgtcaagttctaaaagcactgcttaattttgtttctaaactcacattgcagcacagggcatgatctgccctcaagacaaagaccataagctactctttcctggaaaatgtacaagttggtatctcagcaaatgctactcatgtttcttatccttatgagtaaatcattggcagtatgtgtgattttttttggggggtcaacaggaaaataaacggcctctttttgggggcaggttttgcctgtatttctcctgcctacaaatattataggagcttagaattccagctgctggctcactcttggctgaagttctctgatggctcctgctgggtggaacggcccccttcacctatgtgtgtgtctgctgctgacctgtggctttgcccaggcagggaagctgctggtagtgcccatggatgggagccactggttcaccatgaggtcagtggtggagaaactcattctcaggggcatgaggtggtcgtagtcaggccagaggtgacttggcaactgggaagatcactgaactgcacagtgaagacttactcaacctcatacattctggaggatctggaccgaagttcatggttttcgctgattctcactggaaatcacaagtacaaagtctatatcctctagtgacatgttcatccagtggtattttggacttattttattcaaattgtagaagtttgtttaaggacaaaaaattagtaggatactcaaacgagagttcttttgatgcagtatttctggatccttttaatgcctgtggctttattgttgccaaatatttctccctcccctctgtggtcttcgctaggggaatattttgccactatcttgaagaaggtgcacagtgccctgctcctctttcctatgtccccagaggtctcttagggttctcagatgccatgactttcaaggagagagtgcggaaccacatcctgcactttaaggacattttatttggccccattttttcaaaaatgccctagaaatagtctctgaaattctccaaacacctgtcaccgtatatgatctttacagccacacatcaatttggttgttgtgaactgactttgttttggactatcccaaagctgtgatgcccaacacagtcttcatcagtggtaccagctgccatcagggaaagccattgcctaaggtaagtcatctctcctttagtgtagtaagaataatctggctttgcatcataaaaaaagattttgcattgtgttaggccattcttgaattgctatagaaaatacctgagactggataatttataaagaaaatgggttcaattggcttatgattttgcaggctgtactagcatggtgccagtatgtgcttgtacagcctgcagaaccatgagccaagtaaaccttctgggggagggctcagggagcttttacttgtggtagaaggcaaagtagaagcagacatgtcacatagcaaaagcaagagcaagagagagtgagaagatgtgccacgtacttaaacaaccaaatcttgtgagtactcactattacaagggcagcatcaactcatgagagatctgccctcgtgacccaaacacctcctaccaggccgcacctccaacactgggaactacatttcaacatgagatttggacgggacaaatatccaaactgtatcatttctcccctgcctactcccccaaatcttatgttcctctcatattgcaaactacaataatgcctttccaatagtcccccaaaatctaactcattacatcacttgctcaaaattccaaagtccaaagtctcatcagagacaaggcaagtctcttccacctatcagcctgtaataaaaaacagttatttacttccaagttacaatggaggtacaggcattgggtgctcccattccaaaagggagaaatcagccaaaagaaaggggctacaggccccatgtgagtttgaaacccagcacggcagtcattaaatcttaaagctccaaaataatctcctttgattccatgtctcacatccaggacacactggtgcaaggggtgggctcccatagccttggacaactatgaccctgtggctttgcaggattcaggcctcatagctgctctcacagattgttgagtgcctgcagcttttccaggagcaaggtgcaagctgccagaaggtataccattctggggtctggaggatggtggtcctctttctcatagctccactaagtgataccttattgtggattctgtgtgggggttccaaccccacatttccactctgccctagtagggatttgttgtgagggctccactcctgtagcaggctttttgcctgcgcacccaggctttcccatgcatcctctgaaatctaggtggagggtgccaagcctccttcacttttgcattctgctcacccacaggcttaacaccacatggaagccatcaaggcttatgacttgcaccatctgaggcagcagcccaagctgtatctggggccctttgagctgaggctagagctagagtggctgggatgtggggagcagtgtcctgaggctgcacagggtagcagggccctgggcctggcccacaaaatcattcagtcctcatagacctcaaggcttgtgatgggaggggctgccttggagatctctgatatgcttttgaggccttagcatttggctcctttttagttatgcacatctctctaacaagtggtggctccatgtcctgcctgaattgctctcctgaaaaagctttttctttctctgccacatgacgaagctgcacattttccaaacttttatgcactgcttcccctttaaatataatttccaacttgaagtcctttctttgttcctgcatctaagtgtaggttgttacaagaagccaggccacatcttgaatgctttgctgcttagaaatttcttctgccggataccctaggtcatcactctcaagttcaaacttccataggtccctaaggcatgaacacagtatagccaagttctttgttaaggcataacaagggtgacctttactccagtttccaataactttctcattttcacatgagacctcatcaacctggtgctcatagcccatatttttatcagcgttttggttacaatcatttaaccagtctctaagaaggtgcaaactttcccttcatcttcctgtcttcttctgagtcctgtaaactcttcaaacctctgcctgttaccaagttccaaagtcacttccatattttcagtatctttatagcaatgtcccactctcagtaccaattttctattggtactattttctgttggtaccaattttctattcttcattgtgtagccatgaagaaatgcttgagactgggtaactggtaaataaaagaggtttaattgatgcaagattttgcaggctgcacaagcacggtgctggcatctgttcatattgtggggaagcctcagggagcacttactcatggcagaaggtgaggcaggagcacatcacatgacaaaagcaggagaaagagagagtcgatgggggtggtctgcacacttaaacaaccatatcttgtgaatactcaccgactactgcaaggacagcaccaagctgtgagggatccaccgctatgatccaaacacctcccatcaggccccacctccaacattgcgtattatatttcaacatgagatttgggtggggacaaatatccaaactataacacttactgaactgtgagttaacattttcatttgtcacatttggaatttttttccagttatgtgaatcagtttgtgccatttcatggacctctcagcaattttttatttgtaggtcatatccagttgcacttaaacatactctttttgggaaaataccaaaaaccacagtgagaaatgaaacttccctttattgctaattctatagaaaatgctcttagtagttttgtgtgcatcattttcattttctgaaattattttatgtatatgcagatatctaatgtatattctcacacctattttgttaaaataaattctagtagcaggctgaacatattgttctttactttgcatttttaatttgccaataaattatagacatctttagaggctgatgcagactgatttgacaagttcttttagtaattgcataaaagtctttactttggatttaatgtagttttttcaaccaattaatgttgagatagatttaggcattttccaaatttgtctttgtgcacattactgtgtaaacactctttaatactttctttacattactatatttccatattcgtagcctctgatgaattcttcatcatgtggatccccagcagctttacttctctcattgaaccctgactgctatagaatggaagtagtggctgtggcaaagtagtaccttgtacactttttgacttgaaatacaggaggcagaagcaataggaatgagggtagaggctagaccatagctctactggagtttctgcaggaaaggcaagatagggcaggagaaacagtttagcattggttggtttgaataatttcagtgggctctgagctctaagggcaggccttttgctatctgtaataattggctgacccagggaggtgcactgcatccctaccagatagggatttttaagatgtgaaaatatcataatatacagaaaattaaaccatacacacaatacaggaagtattttattcttatggataaatacccaacagtggaatagctgtgacttatggtaggtgtatggttacctttttgagaatttgccagacaacatttacaagcggccagaccaaggtgccctcccaccacaagcatatgagaggtccaactgttcacactcaccaacactggatgtcttagtccgtttgcattgcgataaaggaatacctgaggttggttaatttaggaagaatacatgtttatttggcttgtggttcattcagggtacaagaagtatgacaccagcacccacatctggcgagagactcaggctgctgccactcatggcagaaggtgagggtggagggtgctgatcacatggctagagagaagcaagagaaaaaggaggcaggtgccaggctctttttaataatcaggtcttgctgaaatgaatagatgggaagttcactccttactgggagggggcactaggtcattcatcagggatccacccaaacacctcccactaagccccactttcaacattagagatcaaatttcaacacttgatttgggagggacagataactcagctatatcatctgatatggtcagtctttttcattgcaactattttaatgggatatggattaaacctcagttttagtttgatttccctaatcattaattatgttgaacatccttacatgtgcctgtttgccgtctgtgtaccttctttggttactgtcttttgaaatctttgctcatgaaaaaacatagatgtctttttaaaaatagactttttattttacaataaatttagatttaaagcaacggtgcaaaaaacagcactgagaattcccatatatcctttgccagtttcccctattgataaatcttggattactatgcacatttatcacaactcattaaccaacactgacatattatgatgaactaaggtctatgttttcttcagatgtcattaattttcacctaatgtccttgttcttttctgggatcccatccaggataccacatgacatttgctcatcacatttgtttgatctcctctagcctgtgacagtttttcagactttccttggttttttttttttttttttttttttgagatggagtcttgctctgtcgcccaggctggagtgcagtggcgcagtctcggctcactgcaagttccacctcctggcttcatgccattctctggcccagcctcccgagtagctgggactacaggcgcccgccactgcgcccggttaattttttttgtatttttagtagagacggggtttcaccatggtctcgatctcctgaccttgtgatccgccggcctcggcctcccaaagtgctgggattacaggcgtgagcaaccgtttccagccttccttagttttgatagcagtttgtttactggcactgcttcttctatggcttctttagtacctgatacagattcaaaagcaccaatctccttcaagtcatcttctgctgattcctctggtgtggtgtctattcgttcttgaatttttcacagatccatatcttgaaagaccatatcccccaacttttgttgctgaattagagatgttgggtttgcaggcaggtagaccactttgaaaccttcagtgttgaactcgtgggttctgggcggctaggggcattgtccaaaatcaaaagaactttcaaagacagtctcttactggcaagacaaagcaatgtagaaccaatccagaagaagtgttcttgtcgaggctttcttgtacaacaaaaaagctggtagtgggtattgatcttttcccttcaaggtgtggaggctagcaggtttatagatgcgggcagtcctatttgtaaatccaatggcatttacacaaagcagtagagttagtttatcccttcttgccctgaatccttgtgtttgcctctcttccttagattagggttacggttagtagcctgcagaaacaatcttgaatagaagcggtaacagcccctcagtccttggcatgatctgaggagtgagcattcagtctttcactattaaagatgatgttagctgtgggttcctccaagatgcccttcattagtttaagatacttccctttttttcccctagtttgttgagaattttttttttatcagaaatggattttggatttttgtcaaacactttttccatacctattgaggtaattatatgcttatacatttttagtttatttatatggtatgttactttaaatgatttataaaaattatttattttatcattaattgtggtgaaatacacatagcataagatatatcatcttcaccactttaggtgcacagttcagtattgagtacattcacattgctgtgcaaccaacaccaccattcatctccagaactctcttcatcttcccaaactgaaactttggaccccttaaaaaataattctctgctccccccacctctcagcccttgtcaacaagcattcaactcttttattctatgaatttgactattttagatacctcatataagtagaatcataaagcatttgtcgttttgtgactagcttagttcactctgcacaatgtccttaaagttcattcatgttagcatatgtcagaattttcttcctttctaaggctaataatattgcattccgtatatatacaccacatttttgcttgggttgtttccacttacaggctgggctcttgtgagttatgttgctatgaacatagtggtaccatgtcaaaccagccttgcattcctaggataaaccccatttggttatggtgtataattttttttatgtagtaactattttaaaatattacagaatttgacttaataatattttgtttaaaatttttgaatctaaggccatgaaggtctgtaatttttttatctcataatatctttgtctggttttggtactgtgataatgctggtcccataaaatgtattaggaaatcccctaggcttcagtttttgggactagtttgtgaataattggtattatttgttccttcaatgtttgctggattcattagtgatgtcatctgagcttcactttgtttcgtgtgggaaggtttgaattacaaatacaaattcaattcgacagatacaggttagttctattggggttatgtatttattcttgtgaatagtctagcagtttgtctctttaacaaaatgtgcccatttcatctaagttgtagattttttgggcataaatttgttcatgatattctcttagcattttaatatctgtagaatctatggtgataccacctctctcattcctgatattgataatttatttcttctctcttttttttttcagatcaaggtggctagagctttaccaaattaattgatctcaacaaaccagctttggtttcattaattttctcaacaaaccagctttggtttaattaattttgccattttttaaacgcattttccatttcattgatttctattctgaagtaagcctccagggaaggtagatcactgaccgtcatgtttatttttcaaggacagtcatctgcaagtgccccagtcaccaaaagaaaagatgactaagcaaatgtctagtaccagttagggtgtcctgaaaggagccatcttgtactcctacaaggattataccccgaggttgtttgtggaatctctcactaaatgttctttaaggtgttgcctgacacacactgcttagctcgtccatgaaggtatcaagaaaacctgcagaatataattctgtccagtgcaacaaatattacggttgattttctttgtgcaaggctgtatttgtctgtttggattgctgtaaaggatacctgaggctgggtaatttataaagaaaaaaggtttaattggctcacagttttgcagcctttatacgaaacacagtgctagcatctgcttctggtgaggcctcaggaagcttacaatcatgacagaaggtgacggggagctggtgtgtcacatggcaagagcaggagcaagagagagacaggagagatggcacatactttctttttaattttaatttttatttctggggtacatgtggaagatgttcaggtttgttacataggtaaacatatgccctggtgccacatgcattttttttttcctgctcttacacttttctttctttttaaatgctttaagttctgggatatatgtgcagaacattgttacacaggtatacacgtgccatggtggtttgctacacccatcaacctgacatctacattaggtgtttctcctaagctatccctcccctagacccccccaccccccgacaggccctggtgtgcgatgttcccctccctgtgtccatgcgttctcattgttcaactccaacttatgtgtgagagcatgcggtgtttggttttgtgttcctgtgttagtttgctgagaattatggtttccagcttcatccatgtttctgcaaaggacatgaactcatccttttttatggctgcatagtattccatgttgtatatgtgccacattttctttatccagtctatcattgatgggcatttgagttggttccacatccttgctgttgcgaatagtgttgcaataaacacacgtgtgcatgcgtctttatagtagaataatttataagccctttggtatatacccagtaatgggattgctgtgtcaaatgatatttctggttctagatccttgaggaatcgccacactgtgttccacaatggttgaactaatttacactcctaccaacagtgtaaaagtgttcctatttctccacatcctctccagcatctgttctttcctgagttttaatgatcgccattctaactggcatgagatggtatctcattgtggatttgatttgcatttctctaatgaccagtgatgatgagctgtttttgatatgtttgctggtcatataaatgtcttcttttgtgaagtgtctgttcatatcctttgcgcactttttgatggggttgtttttttcttgtaaattggtttaagttccttttagattctggatattagccctttgtcagatggataggttgcaaaacttttctccaattctttaagttgcctgttccatctgatgatagtttcttttgctgtgcagaagctctttggtttaattagatcccatttgtcaattttggcttttggttgccattgcttttggtgttttagttatgaagtctttgcccatgcctatgtcctgaatggttattgcctaggttttcttctagggttttcatggttttaggtcttatgtttaaggctttaatccatcttgagttaatttttgtataaggtgtaaggaaggggtccagattcagttttctacaaatggctagccagttttcccaacaccatttattaaatagggaatcgtttccccatttcttgtttttgtcaggtttgtcaaaggtcagatggttgtagatgtgtggcataatttctgaggcctctgttctgttccattggtctatatatctgtttgggtacaagtaccatgctgttttggttactgtagtcttgtagtatagtttgaagtcaagtagcgtgatgcctccagctttgttctttttgcttaggattgtcttggctatactggctcttttttagttccatatgaactttaaagtagtttttttccaattctgtgaagaaattcaatggtagcttgatggggatagcattgaatgtataaattaccttggacagtatgaccattttcacgatattgattcttcctatccatgagcgtggaatgtttttccatttgtttgtgtcctcccttatttacttgagcagtggtttgtagttttccttgaagaggtccttcccatcccttgtaagttgtattcctaggtattttattctctttgtagcaattgtgaatgggagtttactcatgatttggctctgtttttctgttattggtgtataggaatgcctgtgatttttgcacattgatttttgtatcttgagacttttctgaagttgcttatcagcttaaggagattttgggctgagatgatggggttttctaaatatacaatcatgtcatctgcaaacagagacaatttgacttcctctcttcctatttgaatccctatattgctttctcttgcctgattaccttggccagaacttccaatactatgttgaataggagtggtgagagagggcatccttatcttgtgccagttttcaaagggaatgcttccagcttttgcccattcagtatgatattggctgtgtgtttgtcataaaatactcctattattttgagatatgttcaatcaatacctggtttattgagaggttttagcatgaagggctgttgaattttgttgaaggtcttttctgcatctatgaggataatcatgtgttttttgtcattggttctgtttatgtaatggattacgtttattgatttgcatatgttggactagccttgcattccagagatgaagccaacttcatcatggtggataagcttgttgatgtgttgctggatttggtttggcagtattttattgaggattttcaccattgatgttcatcagggatagtggtctgaacttttttgttgttgttgttgtgtctctgccaggttttggtatcaagatgatgctggcctcataaaatgagttatggaggagtctctgtttttctattgttgggaatagtttcagaaggaatggaaccagctcctttttgtacctctggtagaattaggctgtgaatccatctggtcctgggctttttttggttggtaggctattaattactgcctcaatttcagaacctgttattggtttagtcagggattcgacttcttcctggtttagccttgggagggtgtatgagtccgggaatttatccatttctccaagattttttagtttatttgcatagaggtgtttatagtattctctgatggtagtttgtatttctctcggatcagtggtgatctcccttttatcattttttattgtgtctatttgattcttctctcttttcttctgtattagtctggctagtggtctatctattttgttaatcttttcaaaaaaccagctcctggattcattgattttttgaaaatattttgtgtctctatcttcttcagttctgctctgatcttagttttttcttgtcttctgctagcttttgaatttgtttgctcttgcttctctagttcttttaattgtgatgttagggttttgattttagatctttcctgctttctcctgtgg

SEQ ID NO: 12297 - protein, 530 aa, Homo sapiens
  ref <308>: DATABASE ACCESSION NUMBER: SWISS-Prot / AAG30417
  ref <309>: DATABASE ENTRY DATE: 2003-02-01
MARAGWTSPVPLCVCLLLTCGFAEAGKLLVVPMDGSHWFTMQSVVEKLILRGHEVVVVMPEVSWQLERSLNCTVKTYSTSYTLEDQNREFMVFAHAQWKAQAQSIFSLLMSSSSGFLDLFFSHCRSLFNDRKLVEYLKESSFDAVFLDPFDTCGLIVAKYFSLPSVVFTRGIFCHHLEEGAQCPAPLSYVPNDLLGFSDAMTFKERVWNHIVHLEDHLFCQYLFRNALEIASEILQTPVTAYDLYSHTSIWLLRTDFVLDYPKPVMPNMIFIGGINCHQGKPLPMEFEAYINASGEHGIVVFSLGSMVSEIPEKKAMAIADALGKIPQTVLWRYTGTRPSNLANNTILVKWLPQNDLLGHPMTRAFITHAGSHGVYESICNGVPMVMMPLFGDQMDNAKRMETKGAGVTLNVLEMTSEDLENALKAVINDKSYKENIMRLSSLHKDRPVEPLDLAVFWVEFVMRHKGAPHLRPAAHDLTWYQYHSLDVIGFLLAVVLTVAFITFKCCAYGYRKCLGKKGRVKKAHKSKTH

SEQ ID NO: 12298 - DNA, 5952 bp, Rattus norvegicus
  ref <308>: DATABASE ACCESSION NUMBER: EMBL / AF039218
  ref <309>: DATABASE ENTRY DATE: 1998-07-07
gaattcgggcctagacattgccataaatcctttaaatctttaccagaggaggccctggatttaaaacggcccgtttctcagcacgacccagcccgatgtctgcttcttccggcaggcggcctgggtcctcctcacctggggctgagaagcgtcccatctgctcggagtgaggcgaagtctgtcttcctagtcctttaaaactcctgcttatgtcactgcggccactgtgctgactatgctcacgtctcttaatgcaactctctgaaagcccaataagaaaccactgctcgtgtgggactcctaagagttcagacgaatcattgtctctcagcctggccctggatctgtcctctaggtctttgcaaggagatggggggaccaagatggatttaggataaaattaaactggcatccgtataagccagaccgataccaaaaaaaaaaaaaaaaaaaaaaaaaaaaaaaaagcaaacaggtggaccatgatggcggtggcttcttggctcagtgtgctagagaagtgactgcgcagcaggacttggatgacaggactgacagcctttggtgactgtctttttgaagaactgtacgctcctgggtgaagaagcaatgatggagcaggaaatggcccggttgcatcgcagagtgtcagaggtggaggctgtgcttagtcagaaggaggtggagctgaaggcctctgagactcagagatccctcctggagcaggaccttgccacctacatcacagaatgcagtagcttaaagcgaagtctggagcaagcgcggatggaggtgtctcaggaggatgacaaagctcttcagcttctccacgacatcagagagcagagccggaagctccaggagatcaaggagcaggagtaccaggctcaggtggaggagatgaggctgatgatgaatcagctggaagaggacctcgtgtcagcccgaagacgcagcgatctctacgagtctgagctgagggagtctcggctcgccgccgaggaattcaagcggaaggcaaacgaatgtcagcataaactgatgaaggctaaggacctagggaagcctgaagtgggagaatgttccagactggagaagatcaatgctgagcagcagctgaagattcaggagctccaggagaagctggagaaggctgtaaaagccagcaccgaggccacagagctcctgcagaacatccggcaggcaaaggagcgagctgagagggagctggagaagctgcacaacagggaagattcttccgaaggcatcaaaaagaaactggtggaagctgaggaacgccgccactccctggagaacaaggtaaagagactagagaccatggagcgtagagagaacagactgaaggatgacatccagacaaagtccgaacagatccagcagatggctgataaaattctggagctggaggagaagcatcgggaggctcaggtctcagctcaacacctagaagtacacctgaagcagaaggaacagcactatgaggaaaagatcaaagtgttggacaatcagataaagaaggacttggccgacaaggagagcctagagaccatgatgcagaggcacgaagaggaggcccacgagaagggcaagatcctcagcgagcagaaggcgatgatcaacgcaatggattccaagatcagatccctggagcagaggattgtggagctgtcagaagccaacaagcttgcggcaaacagcagtctcttcacccagaggaacatgaaggcccaggaagagatgatctcagaactcaggcagcagaaattttacctggagacacaggccgggaagctggaggcccagaaccgaaaactggaagagcaactagagaagatcagccaccaagatcacagtgacaagaatcggctgctggagctggagacaaggttgagagaggtcagcctggagcatgaggagcagaagctggagctgaagcggcagctcacggagctgcagctgtccctgcaggagcgtgagtcccagctgacggccctgcaggccgcccgggctgcccttgagagccagctccgccaggcgaagacggagctggaggagacaactgcagaagcggaggaggagatccaggcactcacggcacatcgagatgaaatccagcgcaaattcgatgcccttcgcaacagctgtactgtcatcaccgacctggaggagcagctgaaccagctcaccgaggacaacgccgagctcaacaaccaaaacttctacctgtccaaacaactcgatgaggcttcgggtgccaacgatgagattgtgcagctgcgaagcgaggtggaccatctccgccgtgagatcacggagcgggagatgcagctcaccagccagaagcaaacaatggaggctctgaagacgacctgcaccatgctggaggagcaggtcatggacctggaggccctgaacgacgagctgctggagaaggagcgccagtgggaggcctggaggagcgtcctcggggacgagaagtctcagtttgagtgtcgagttcgagagctacagaggatgctggacaccgagaagcagagcagggctagagctgatcagcggatcacggagtctcgccaggtggtggagctggcagtgaaggagcacaaagccgagattctcgcgctgcagcaggctctcaaagagcagaagctgaaagctgagagcctgtcggacaagctcaacgacctggagaagaagcacgccatgcttgagatgaatgcccggagcttacagcagaaactggagacagagcgggagctcaaacagaggcttctggaggagcaagccaagttgcagcagcagatggacctgcagaagaaccacatcttcagactgacacaagggctgcaggaggcgctggaccgggcggatctgctgaagaccgaaaggagcgacctggaatatcagctggaaaacattcaggttctctactcacacgagaaggtgaaaatggaaggcactatttctcaacaaaccaaactcattgatttcctgcaagccaaaatggaccagcccgctaaaaagaaaaagggtttatttagtcgacggaaagaggaccctgctttgcccacacaggttcctctgcagtacaatgagctgaagctcgccctggaaaaggagaaagcgcgctgtgcggagctggaggaagcccttcagaagacccgcatcgaactccggtccgcacgggaggaagctgctcaccgcaaagccacggaccacccgcacccatctacgccagccactgcgaggcagcagatcgccatgtccgccatcgtgcggtcgcctgagcaccagcccagtgccatgagcctgctcgccccaccatccagccgcagaaaggaggcgtcaactccagaggagttcagccggcgtcttaaagaacgtatgcaccacaacattcctcaccggtttaacgtgggcctgaatatgcgagccaccaagtgcgccgtgtgtctggatactgtgcactttggacgccaggcatccaaatgtctcgaatgtcaggtgatgtgccatcccaagtgttccacctgcttgcccgccacctgtggcctacctgccgaatatgccacacacttcaccgaggccttctgccgagacaaagtgagctccccggggctccagagcaaggagcccagcagcagcttgcacctggaagggtggatgaaagtgcccaggaataacaaacgaggacagcaaggctgggacagaaagtacattgtcttagagggttcaaaagtcctcatctatgacaacgaagccagagaagctggacagaggccggtggaagaatttgagctgtgccttcccgacggggatgtatctattcatggtgccgttggtgcttctgaacttgcaaatacagccaaagcagatgtcccatacatactgaagatggagtcccatccgcataccacctgctggcctgggagaaccctctacctgctggcacccagctttcctgacaagcagcgctgggtcacagccctagagtctgtcgtcgcaggtgggagagtttctagggaaaaggcagaggccgatgctgcatgggactgtacttcttgtgagcgtctgcccgtgtgggttgagaaattacttggaaactctctgctgaagctggaaggtgacgaccggcttgacatgaactgtaccctgcccttcagcgaccaggtggtgctggtgggcaccgaggagggcctctatgcgctgaacgtcttgaaaaactccttaacccacatcccaggaatcggagcagtcttccagatttacatcatcaaggacctggagaagctgctcatgatagcaggggaagagcgggctctgtgtttggtggacgtgaagaaggtgaagcagtcgttggcacagtcacaccttcctgcccagcctgacgtctcccccaacatatttgaagccgtcaaaggctgccacctgtttgctgctggcaagatcgagaacagcctctgcatctgtgccgccatgccgagcaaagtcgtcatcctgcgctacaacgacaacctcagcaagttctgcatccgcaaggagattgagacctctgagccctgcagctgtatccacttcaccaattacagtatcctcatcggaaccaacaagttctatgagatcgacatgaaacagtacacgcttgaggagttcctggacaagaatgaccattccttggcacctgctgtgttcgcatcctcgaccaacagcttccccgtctccatcgtgcaggcaaacagcaccgggcagcgggaagagtacctgctgtgtttccacgaatttggggtgttcgtggattcttatggaagacgtagccgcacagacgatctcaagtggagtcgcttacctctggccttcgcctacagagagccttatctgtttgtgactcactttaactccctggaagtaattgagatccaggcacgttcctcactggggacccctgcccgagcctatctggaaatcccaaaccctcgctacctgggccccgcaatttcctccggagcaatttacctggcctcctcataccaggacaagttaagggtcatatgctgcaaaggaaacctcgtgaaggagtctggcactgagcagcaccgcgtgccctccacatcccgcagccctaacaagcgaggcccaccaacatacaacgagcacatcaccaaacgtgtggcctccagcccagcgccaccagaaggccccagccatccccgagagccaagcacaccccaccgctaccgagacagagagggccggacagagctgcgcagggacaagtctccaggccgtcctctggagcgggagaagtcgccaggccggatgctcagcacgaggagagagcggtccccggggagactgtttgaagacagcagcaggggccggctgcctgcgggagccgtgaggaccccactgtcccaggttaacaaggtctgggaccagtcttcagtataagtctcagcctgaagaactcctcctcatctcagtctgcaggaagacaactgcgccctgggtctccaccgcaggggatcccagcaccgtctgctcgccgcattcggcacagctgggtccagactgtccttggcacggatacccccatctccgaggggtgcagatagccaaggctcttaggcgctgccagcgctcagttcccccctcggaggggggagcaccctcctgcggtcatctctgcactgttactctctcacagcattcacagacttttgtacttagctccagcctgaacccattcatcaaaaggaaaccaacccagactcgaaccgtggctggaagtccactgctactcttaagatccttgggttggttattttttatttttccctttggttttgatcatctcctcctcttcttcttcctccctcttgttcctcttcctcctcctttctccttttttttttttttaagacaacagaattc

SEQ ID NO: 12299 - protein, 1619 aa, Rattus norvegicus
  misc_feature (1)..(1619): Xaa=Unknown amino acid
MEQEMARLHRRVSEVEAVLSQKEVELKASETQRSLLEQDLATYITECSSLKRSLEQARMEVSQEDDKALQLLHDIREQSRKLQEIKEQEYQAQVEEMRLMMNQLEEDLVSARRRSDLYESELRESRLAAEEFKRKANECQHKLMKAKDLGKPEVGECSRLEKINAEQQLKIQELQEKLEKAVKASTEATELLQNIRQAKERAERELEKLHNREDSSEGIKKKLVEAEERRHSLENKVKRLETMERRENRLKDDIQTKSEQIQQMADKILELEEKHREAQVSAQHLEVHLKQKEQHYEEKIKVLDNQIKKDLADKESLETMMQRHEEEAHEKGKILSEQKAMINAMDSKIRSLEQRIVELSEANKLAANSSLFTQRNMKAQEEMISELRQQKFYLETQAGKLEAQNRKLEEQLEKISHQDHSDKNRLLELETRLREVSLEHEEQKLELKRQLTELQLSLQERESQLTALQAARAALESQLRQAKTELEETTAEAEEEIQALTAHRDEIQRKFDALRNSCTVITDLEEQLNQLTEDNAELNNQNFYLSKQLDEASGANDEIVQLRSEVDHLRREITEREMQLTSQKQTMEALKTTCTMLEEQVMDLEALNDELLEKERQWEAWRSVLGDEKSQFECRVRELQRMLDTEKQSRARADQRITESRQVVELAVKEHKAEILALQQALKEQKLKAESLSDKLNDLEKKHAMLEMNARSLQQKLETERELKQRLLEEQAKLQQQMDLQKNHIFRLTQGLQEALDRADLLKTERSDLEYQLENIQVLYSHEKVKMEGTISQQTKLIDFLQAKMDQPAKKKKGLFSRRKEDPALPTQVPLQYNELKLALEKEKARCAELEEALQKTRIELRSAREEAAHRKATDHPHPSTPATARQQIAMSAIVRSPEHQPSAMSLLAPPSSRRKEASTPEEFSRRLKERMHHNIPHRFNVGLNMRATKCAVCLDTVHFGRQASKCLECQVMCHPKCSTCLPATCGLPAEYATHFTEAFCRDKVSSPGLQSKEPSSSLHLEGWMKVPRNNKRGQQGWDRKYIVLEGSKVLIYDNEAREAGQRPVEEFELCLPDGDVSIHGAVGASELANTAKADVPYILKMESHPHTTCWPGRTLYLLAPSFPDKQRWVTALESVVAGGRVSREKAEADAAWDCTSCERLPVWVEKLLGNSLLKLEGDDRLDMNCTLPFSDQVVLVGTEEGLYALNVLKNSLTHIPGIGAVFQIYIIKDLEKLLMIAGEERALCLVDVKKVKQSLAQSHLPAQPDVSPNIFEAVKGCHLFAAGKIENSLCICAAMPSKVVILRYNDNLSKFCIRKEIETSEPCSCIHFTNYSILIGTNKFYEIDMKQYTLEEFLDKNDHSLAPAVFASSTNSFPVSIVQANSTGQREEYLLCFHEFGVFVDSYGRRSRTDDLKWSRLPLAFAYREPYLFVTHFNSLEVIEIQARSSLGTPARAYLEIPNPRYLGPAISSGAIYLASSYQDKLRVICCKGNLVKESGTEQHRVPSTSRSPNKRGPPTYNEHITKRVASSPAPPEGPSHPREPSTPHRYRDREGRTELRRDKSPGRPLEREKSPGRMLSTRRERSPGRLFEDSSRGRLPAGAVRTPLSQVNKVWDQSSVX

SEQ ID NO: 12300 - DNA, 31737 bp, Homo sapiens
  ref <308>: DATABASE ACCESSION NUMBER: EMBL / AC002563
  ref <309>: DATABASE ENTRY DATE: 2000-03-03
gatcatacattgcatataattgttaggttcatctagttttctttaatctaggagagtctcctgatgtgtttgggtgggtgggtgtgcatgtctttcacgacattgactttttaaaaataatttcaagccatttgtcttgcagaaagttgctcaaatagaatttaccctattattccctcttaattaaaaaaagctaggtatattgagaaaactacatagggccaggtgcagtggctcatgcctgtaatcccaacactctgagaggccgaggcaagtggattgcttgaggctggaagttcgagaccagcctggccaacatggtgaaactctctctgctaaaaatacaaaaatttgccacgcgtggtggcaggcacctttagtctcagctactcaggaggctgaggcgggagaatggcttgaacccaggaggcagaggttgcagtgagctgagatcacgtcactgcactccagcctgggaaacaaagcaagactccgtctccggaaaaaaaaaaaaaagaagaaaaaggaggaggaggaggaggaggaggagaagggagaagggagaagggagaagagaagagaagagaagagaagagaagagaagagaagagaagagaagagaagagaaaaaagaaaagaaaagaaaactacacaggtaaaatgtccttgctagggtattttatcagaaggcacatgatgtcatttggtcaagattctcttattattaaagggagaagaacagtatctggccttcatttcagcagcaagcagtctctgaatacctcttctttgcctggcagtgtactatgtcctgcagacctcaaagatgccctcaaaaacttcacattctgtggggaaacagaaatattcatgcactcattcagtcaataacatatttcttgagctccaacaatgtgccagacaccactctaagtactagaaacaaggatgatatttaaatatttaacaagtttggcatgagcacagaatcagagaagatgctctgctgagcccaataacccttaagttgctggatcatggggaaaccggggaaaaggcagaggagcaagtgggatggctgggatattggggaaggcggacaagcttcagagtagctgctatttatcagtgagtacagagtatttcaacattttaacagctgggaatgacagccgtggcttgggcatggagatgaaaaattcagccaaggtccctgacctcatggattgaccttctagtgcaggagtgggcgaacttctttggtaaatgaccaaatagtaaatatttttggccttgcaggccctacattctctggacagagaggcaaagtcccaactactcaactctgtctttgtagcacaaaagtagtgtgtcagtccattttgcactgctataaagaaatacctaacactgaatgatttataaagaaaggaggtttgtttggtgcatggttctgcaggctaaacaaacatggcgccagtatcttcttccggtgaggactcaggaagcctttactcattgtggaaagcaaggggaaaacaattgtgtcatgtggcaagacagagagagagagcaagagaacgatgccaggctcttttaaacaaccagctcacacatgaactaacagagtgagaactcattactgcagggagggcaccaagccattaatgagggtctgccccctgaccacaacatctcccaccaggccccacctccaacattggggatcacgtttacacatgagatttggagggaacaaacatccaaactgaggtaggaggcgggacttgactccagaccagattgaagaccggctgaaacagggaaaaggcactcaaagctcctctccataagacatgctcaccagtgccatgacagtttaccattgctatggcaacacccagaagctaccacccctttccagggcaatgactcggaagttgtcaccccttttcagggccacgacccagaagttactaccccttatctaaaaatttcttaacaacctgccccttaatttacatatagttaaaagtgagtataaatctgactgcagcactgccctgagctgctgctctcaacacgctacctatggggtagccttgctctgcaggagcagtcatggagctgtaactcaaccagggctctaatgctgctgcctcaatcaagctgcttttatattttattttttttatttttatttttgagacggagtttcactcttgttgcccaggctggagtgcaatggcaaaaatctcagctcactgcaacctctgcctcccaggttcaagcaattctcctgcctcagcttcccgagtagctgggattacaggtgcctgccatcacacccggctaattttttgtattttcagtagagacagagttttaccatgttggccaggatggtcttgaactcctgacctcaggtgatccacctgcctcgacctcccaaagtgctgggattacaggcgtgagccagcacgcccggcctaaagctgctttcttctaccaccagctcactctttttttttttttttttttttttttgagatggagtcttgctcagtcgcccaggctggagtgcagtggcacgatcttggctcactgcaagctccgcctcccagattcacgccattctcttgcctcagcctcccaagtagctgggactataggcgcccgccaccacgcccggctaatttttttttatttttagtagagacggggtttcactgtgttagccaggatggtcttgatctcctgacctcgtgatctgcccatctcatcctcccaaagtgctgggattacaggcatgagccaccacgcccggcccaccagctcactcttaaattctttcctgagagaggtcaaaaaacttcccaggctaggccccagttctggggctcacctgccctacaacaaaactatatcaaatagccacagacagtagtaaacaaatgagtgtgactatgttccaaataagctttatttacaaaaacaggcagcaggctggatttggcccatgggccatgatttgcaaatcccattctagtgaacaagacagacatactcatttgtgtttttatgctacaaatacttatccagcatcttctacatggcaagtattgcactggacactggtatgccgaacaagacagaaggccgggcgtggtggctcatgcctgtaatcccagcactctgggagaccaaggtggatggattacttgaggtcaggagtttgagaccagcctggccaatgtggtaaaaccctgtctctactaaaaatacaaaaattagccaggcgtggtggcgggcacctgtaatcccagctacttgggaggctgaggcaggagaattgcttgaacccgggaggcggaggttgccatgagccaaggttgtgccactgcacttcagcctgggtgacagagtgagactctgtctcaaaaaaaaaaagaaaagataaaagacagacgatgacccctgcccacgttgcacttacatgctggtgggagagacaaaatcttgttacgtaaatgctaagacaaaagtcatcaggaaatacagagggggcagttaactcatccttagagtttagggaaggattcctggaggaggggatgactgtgttgtttgcttagcaggctgtcagtgagatgagcaaagtcaccagagagctcttggaaccttttcatcaggacagcctgaggacctccatccctttccctgtgggttatctgtcatcaccagctcttcccttctgtcccccagtctctgaacagctacaacgatggagactacgaaggagccaggcggcttgggcggaatgctaagtgggtagccatcgcctccatcatcattggccttctcatcatcggcatttcttgtgcagttcacttcacaaggaagtaagtaggctttttgaatccctccccatgtcaaacgccctttctcgaacgcccgttggaatctgttagggtagattaggttatgctccagtaacaaccccaagccaaagggttttcatgttttcttctcagaataaatttgtcccagtccagagggacatatcaacagtgtggatcttctagtgcgggagtgggtgaactcctttggtaaatgaccaaatagttaatatttctggccttacaggccctacatcctctggacagagggacatagtcccaactactcaactcagtctttgtagcacaaaagtagtgtgttagtccattctgcattgctataaagaaatacctcagactgagtgatttataaaaaaagaaggtttggatgcttctttggatcaggtcaacaatatggatccattacatggatcatataggtcagtggaaggtctctcctccacacagtcatgcagggtcccacgctatacaaagctgcaccatcttgtagctgctctatctaggacagaagtcaacaaactttgtctgtaaagggccagatagtaaatcttttaagccttgcaggccatatggtcccgatcatggtctctggcacagctacttagctctgccattttagcacaaaagcagccatagacaatatagaaatgaacaggcgtggctgtgttccaataaaactttatttacaacaacaggcatctgtctgtgggctgtagtttgccaacttcagatctagaacatgaggtgtcctcaggcaaaggcgggggagaggaagactggagaatcccacatgggctttttactgcctagcgacaaatgtcgcttaggcttacattgactgaaatcagtcacgtaatcccacctaactgtaagagggtaggaaatgtgggagaataaatgggatatttaggattgctatttgctctgccctagcacatcatctgctaaataaactcctacttgcatcaaactagcataactgttttagtttaagggcagaaaggtcactacatatttttggtattgacaaggagctctcatctcatgaagagatggatgctgctgatgtgttgtccctctggactgggacaaatttattctgatttctctaaccagctcagatgggctccatctgctagactcaataacactttccgtcagaggtttgacagacagcaaggtcatgtgataggcaactcagacccagaaatgacaagtccagatccatctctgtcttgctgtgtaatttctggtaagacagataagaatgctgagaaattctttcacttttctgccacagcagcatggctactcctatacccttgaccaaagtcctacacccatcaaactgagaaggtcaacctctttctcttggttgacaaaggaggctcacccagatgggtgagggaggaaggagacctcttttgacattccagatcagccaacccaaccttggcaaccaagacagtagcagatgtcatggtagatccacttcctatcagagaaggcagacccaggaacaaccagtggcagctgggtagaggggaagatgtcaaaacagaagtgtcacaaaagaaaattaaatggctttggccaaataaaagagaaaaggacactcaaacatgaaaggaaactcaaggtttcttgcctgcaggatggcaaatttgatgttggcccatgaagaggaagatggttggagaatacacgtgaatgaacctgactatattcttaagagaaggtgtaaggtgcttgtgaacttgtgagcaggggagccacagagtgtgggtttaatggtgcagttttggcaccagactgcctggacccaggtcccagtcaccacttattcactgtgagaccttcagccaattgtttaacattcctgaacctcagtttcctcacctgtaaaatgagaataatagtagtacccatttcataaagctattgtaaaggttaactggatgacccacagaatgtgtaggttggtgtctctgttctttagtgggtgcacaaaaatgtaaaccatttattaatcccattattactaatattatcaatgttactgggaaaggacctcagaattcaagatgccattaaatagaattcaaggctttatatttatgagccaaacaaaggacaatgttctaagggaatgagaccaagccttggcttgactcctgggaacttgggaaaatgcatactgcctagattagtgtttgagctaagtgggttataataatagcagctgacactaacatagaccttgacatatgccaggtactgttctaagctcttaacattaattaatcctcattgagtcttcacagcaacccaaagaggtagataggtattattatccctattttgtagatgaggaaaccgagactcagagaggtaaagtgacttgcccaaagcctcacagctagttagtggaaaaggtaggatttaaaaccaggatagtgtcgctcttcaggctgtgttcttagccaaactctgcactgccgctaagtcaatatgttcctgctagtacacccagtaacaaaggccagtaagtggtacttgctttgtggctaactccaggattgatttacgggggaatggtatggtgaggtttcatcctacagaaatgtgtgatgagtcagggctaaggttcacaaaatcaaaggagtacaggggtcaggggaaggacatacatgaggtagcctggttataggacaataggaagtggtggggaccatggtaatttcaaaagcacagtttaaaggaagcagccaccactctgctccaattgtaaccacttagtatgcaggcctcatggggctcatttttcaagagatgttggaaatctgggattttatgtaaaatctccaaatttttagatgttgacaaccaattcacattactaaaacgcatggttagcaattcacattactaaaacacaaaaacaatatttgcagcctagacactatctactttgcagtctctagtggacagtttgctttcaaagatcagtttgctcatggcaactccatccaagaagtgttggaagggatctagaagcattcatatgttagactttctccagccttaatataagtgtttttatctggggatgaagtgttgatgtctctgcttgtgattgaagctttgttaggaataaaaggtatgagaaggagttgcctctttgatccttcttcctaaaaggcactgttcacaaaggttagagcctatgatttaataccagctttatcaggattcagatcctacttctaccacacaggctatctgggcaaattattaaactctctgtgcctcaatttccctaactataaaatgagaattgaattatttccccatctgtaaggtcaaattccttctagatgcctttccctctgttattaaagaaaacaggccaggcacagtggctgatgcctataatcctagcactttgggaggcaaagatggaaggatctcttgaggccaggagttccttgaccagcctgggcaacatagctagaccccatctctaaaaaaaaaaaattttttttaattagctgggcatggtggcacacacctgtattcccagctatttggaaggctgagatgggaggatcacttgagtccaggaattcaaggctgcagtgagctgtggtcatgccatcgcactctagcctacatgacagagtgagaccctgtctcaaaaactaaataaataaattttaaaagagacccaaatttaaaggctttgtcatatgcatgtaggggcaagagagagagagacagagagaaagaaggaaagaggcagaaaagaactagctgttagagaatgaaatcaattctctcttccaggtaacatggccaatttctcagtaatcctttgaaattaaatctcccagccctcatttacaggagtaactaaatggcaatatgaaacttttaaggcaaaagtacccaagctttagactccataagagttacctggagaggttttaaaaaagttagcatccgagcctcacctccaaagattccaacctgctaaatcagaagtggggttcaagaacatctgcatctttcagctgcccctgctcccaacctgaggattcagatgcaggtggcgggcagaagggtctttgccaaaccttggcaaatatcctgccaccaaagtccacaaggaagaacgtgcgaatggtggccattcatggactggtcggttttcatttacagcaaactcatcatcctaatctgctgtctaacccaatgctagggaggggaatgaagttgccacctagcaggtctacccacagggagcctcctttgtaacaatctatttccacagaggggctggaaaatctgacattagaggagtcgaagcctgaagatgagcccaaaacccatgaatctgtgagttttctgaaagtattcattccaaaatgctgtctcggggctgggtgtggtggctcacacctgtaatccaataccttgggctgaggtgggaggatctcttgaggccaggagtttaggaccagcctgggcaacatagcaagaccctgttgctccaaaaaatatttattttaaattagctgggtttggtggcgcatacctgtcatcctagctatttgggaggcggaagcaggaggatcttttgagcccaggagattgaggctgcagtgagctgtgatcacaccactgcactgcagcctaagcaacagagtgagaccctgtctcaaaaaaaaacaaaaacaaaaacaaaacctgtctgaagtaaattactgccttttaaaaattgtaaattccctgtctttaaaaaaatcattctttatccttattaagaaagctgtaaccaatgtgttagagaacagattgaaatctcaaatggttgaaatcccgggtagtttacttccttggcgtagtctcagatcatgatagtctttacccaaactcataaaaagctctcattcgtcctattttacaggatatctatgtaagccacatggtggctggggcaatgaaacacggggtttcatgacatcaaattcctaagagctgggaattattcaactgaaatattaaaccattttggatagaatcgtgcattgacagcagggaattgttcttgtccagacagaatcatgaacttgcagtctttcaaagtcagaaaactctccgccctcaagctgctagggaaagtgaagaaataaatcacacaggtgaaaggtttaaatatagtagctgtccatttatcaatcctagtaattcaaacccctagtcaaaaccaacctatttgcaggcttttgcttcctgctaataccttgaggactcaagcaaggttaggttattctagtgatgtttctcaaagcacaaatctcagagccacctacgacagattcatctgggatgtttataaaaatgcaagttcctggaccccatttcctgagtagcctggaaatatgacaagccaccttccccaaaaaataattctaaatattctaaagttgcagaactactatcctagggcttgcatttaatgaagaacattcttgcctgtgtggacatgtgccaacaaacaagactttttgcatccctaagataaaagataaacagtttttcttctcttatacactcaacacaacacacagctgtgagcaggtgtgttttgtttcccccacacaccaagcaattgtccagtgactaccaactaggtattctgtaatttagcccgattatgacaccatctactgggagttagagtcagatcccacaggttaatggtttggtcccccaagactgcctcccatttcagatgctaattgcaagccccaggttgtgacctgcgcttctgactggctggctcttagttggagattttcaccaccctcttctcagtttctattaatgcgctaaagtggctcacagaactcaaggcaacacttacttatgtttacccatttattacaaaggatattacaaaggatacagatgaacagtcagatggaagagatgcatagggcaaggtatagaggaaggggcgtggtgtttccatgtgtgccaccttccaggtcccaccacacattcagcaatctaaaacctctcccaaccctgtccttttgggtttgcatgggggcttcattacataggcatgaccaattacatcactggccattggtgcccaactcaaaatcaaccttcaggccatttgtcctccctggagtccagggggtgggactggaagttccaaccttctaattacatggctggttcccctggcaacccactcccaacctgaggctatccaggagcccaccaagagttgcctcattagaacaaatatagtcccatcacccaggaaattccaagaaactggggagctctgtgtcagaaactggagtcaaagacaaaacatcaaaacaaaagattctcctagtacccagtctacaagggtgttaggagctctgtgtcaagaaccagatgcagggatcaaatatttcttattgttattatagcacaacatcacacctaaggtacctggtagaagcttcagttattgctgcttccctggaaagtttacacacctcccaaattttctcttcctccctcccttttgtttttggtttttgagacaggggtctcattatgttgccccggctggtcttgaactcccagcctcaagtgatcctcccacctcagcctcctgagttagctgggattacagggttgagccaccacacccagctcttttcatctctcattgagattaggctcatggtcacttatctgatgctctgtggaattcagcggaacgtccttagcagcagaaagagttgaccaggacaacatttgggtatgagacaaatgtcctctgtgacaaatatgacattcccggatgaccctgctaatacagtggagcttcatgttactcaggagtaaggttctcatgtcagggcacaaggtgagctttgagtataatcaaacttaatcttggaagtatccaaggagggcgccctactggagactcacacatggtatcttgatcagcccagcatagccagtgaatgtttccagtgttggaacaggtgactgttccttgggttgagagcccactgaagtatgtggctgggtttagggttcatggcatctgtttcaacactggaaccacactctgggctcacatagaaggaatagatgtgacatccccatccgtgctcatgatcattgagcggggcggcagtcagaaactccagctctatttaaacagttgctttttttgtttttgaggaacataaatagttgatctgccacatgttaaatgcacatacaatgtaactcccctgaaggtacatctctgagtggtcttgttgaggtgtaaacagccaggtacacacctgtgtgttaaaaatgcttgcttgccattcttaacaacaacagcctttgtgctccaaggttttcattaaggaaaaacttacctctaaacaggggttagggtcccatgactgtgtctcattagcaggcacagagttagaagaccttgacccattctgtactgggaaagcgtctctctcataagcaaattgaaatgaatcctttcctggtctcaaaatatccttcaattgcatcagaattggaaggagacatacatatcaaggtggaacttgacctttttgcaaaagcttaaaagcaaatccctcttcttttctatatttttggctggggaaaggctttctgggaattgttttgatcagagaatttttgtgattccataatgaaaaatgggaatcattacctatttctagaaggttagaagggtctttctctgttggttcagataagttcaggtagagacaaatcagacctaagttgccagcaacaatggaagaatttttgcttggaaaaggatataagctagcagcgcattgatgaagaaatcagaatgaacattaaaaagatgttcaacctcactagtaatcaagaaagcacaaattaaagcaataacaacaaaaatcctacatatttttgtctggcagattgcaacaattaaaaagatgggtaatatcaaggttgaccaggatgtgaaaaatttgacactatactggtggtgaaagagaaaattgggacagtcttttggaaagtcagtttggatgtatctaatataaaatccaggcacccaccaacccagcaattccactgctcagtatccaccttagagacaggtgcacagaaatgcatgtaacacagtaatgcttcaccctagctacgtgttagaatcacctggggagctttaaacatatgccaatgccgctgggcactgtagttcatgcctgaaatcccagcactttgggaggcagaaacaggaggatcactagagctcaggagctggaggccagcctgggaaacatagcaagatctcatctctactaaaaatttaaaaaaatatatctgggcttggtggcatgcacctgtagtcccagctacttgggaggctcaggtgtgaggccagcttgagcccaagaggtcgagggtgcagtccgctataattgtgccactgtactccagcctgggtgacagagcaagaccctgtctcaaaaaattaaaacaaaaaaatttttaaaaacaatgcccagggcccaccctggaccaattaaattagaatctccagtaacagggccaggaattggtagactgtagggctctccaggtaactctaatgtgcagccagggttgggaaccacagacgtgcaacgatgttcattgcagctttgtttgcaataggagaaaccttgaaacaacctaaatgtccatcagtaggcaggttaaattaggagtgatgtattcatatgatgggacgccacactgcagtttaaacatgaagacagggccaggtgccctggttcatacctgtaatcccagcactttgggaggccgaggtgggaggatcacttgagcccaggagttcaagaccagcctgggcgatatactgagatcccgtctctatttttttttaagtatacaggtggagacatccttcttactatgactttacaagccctgcatgatctggctgccacctccccatcctcatctcccatcccacatcctcatctcccctctctctccctttcactccctccacttcagccacatcagagtcctctctgagcaatgcaagcatattcctgcctcagggcctctgcacttgccgttccctctgcctggaattctcttccttctaaaagccaaacagctggttcccatttctccttctggtacttgttcatatattacattagcaaagagactatccctttagccagttttacttctcttccttactactccctgacaaattatatatctatgtctgtttcccccctactggcatgagaactccagggacattttcatttctgttattgcccataataatagagcatggcccttaagagtgcctatttatggccaggtgtggtgactcacacctgtaatcccagcactttgggaggctgaggcgggtggatcacaaggtcaggagatcgataccatcctggctaacatggtgaaaccccgtctctactaaaaatagaaaaaaaaaaattagctgggcatggtggcaggcgcctgtagtcccagctacttgggaggctgaggcaggagaatggcatgaacccaggaggtggaggttgcagtgagccgagatcatgccactgcactccagcctgggcaacagagcgagactccatctcaaaaaaaaaagaaaaaaagaaaaagaggacctatttacaagttagactgctggagttccagtccaggtgcttcctctaagtagctgtgtgcccttgggtatatcttttaagcagtctgtgcctctgttttctcatacataaaatggggataataacagtgcctatctcatagggctgtgagggttaaatggcacaaactacagggcctggcactctgtactcactaggtaactgttgggtattattactatcatcagcacctaaagcagtgcccagcatgtaaataagcattgaataaatgaatgagtaaaacaaaaaaagaaattgcagcacgatcacattgtgtaaacgcatacacatgatgagtatataatttctacatgcttattgatcagtttcaatgcagagaaaaacgcctggagaacttacaccaaactgctaacagcactactatactaatccttggggaggagagtgaggttcggaaatgctcaagaggcatttttccatatccgcattttgtttgttgttgttgttttgttttgttttttgagatggagtcttgctcagtcgcccaggctggagtgcagtggcacaatctcggctcactgcaagctccgcctcccgggttcacgccattctcctgcctcagcctcccaagtagctgggactacaggcacccgccaccacgcccggctaattttttttgtatttttagtagagatgcagtttcaccatgttagccaggatggtctctatctcctgacctcgtgatccacccgcctcagcctcccaaagtgctgggattacaggcgtgagccaccatgcctggcctgtttttgcttttgtttttttgcacgtaccacatgtaagataaaataagttttacaaatagaatatgtttctcaaaaggaagcccctgcttagagtcaaaagtgtgcacgcaggctggtacatttcaacatgtgtttaaccagagtcatcatcatcaaataaggaaggcatcgagctgggaaagccaaccacagaagctcagcccacggtctttctctctctctctctgtctgtaccacacagtgcctgaggaaccagcggtcagtgggctgtgagcgtggaggatggacctcatccacacacaccccaaaggagtttctaaggaatggatccttgacttcagactgtgagatcttttcctccaggactctccagaggcaggtccctggcaaatgaacaagaaaaaaaaaaaaaaaaagtccaaaatttaggcaatccaagctgcacagccggatcagccaaagtcattgatttgtaaaaatgaaaagaaaacagaaaaaagaaaaatgaagtctcactgtctcagtttagcgaatcccgttgtgtccactcctgtcctccagaggcgagcctcaggaaatcacataacttttcactgaggggatccagggggtctccatatagggggagatggaggtttctaggaagagcagcaggtgctggtatttacaatgttgagcacaaacatttgcagcatgtttaaaattgtctagtagagttcaagttgtggatttgcttttccttttattcttataaccttcagtaactcctcctctgggagtcagcactcccatgcccagagttcacccatctggtcatcaaacactcaaagaaggggcttttctggccttttgtcttgatgcttatatttccaaataggccccctcccttgcttgcatccacgttggtcaacttgaccaaaacctcactcttcactcaaacaggctctgagaatggacttagtggccaattctaggtacatgagcacttcctgtatcccagttttgggaataaactggctgtatttatagaatgtgctttttttttttcaatttctcactctctctcctatctctagcaagtctcaggcaagatctttgattttcctggatgccacctggaaatgccacccattgtgtttcttttctgtcaaatgtaaaccctttagatgtgaatgtactggtttaatgatgccattattctgcctgccagaacgcagtaacccagtgtctcacagagcacaaggggtgtgccactggtggtacacaagataatttttaagtagtttctaggaacaacattaagtaataccaaatcacaaagaatgtttccccttttctattcttttttcatcctgattacagcaaggaaaaagtctctgtttagtgctagcaggtcctttacacctttcagacactatggctcttttccctttttagcaaagaaagagcaggcctcagagtcttctgtctagatagaatttaatgatattgttttgtgtcatggtatttattttatttattaccttccatttacagcttcccacagtgggggatgtgacatattgtttctgttcaaataaattaagaaaaacaagagaactcaagaaaatatcaagtaattaacacaccagataagtatatgtggcaaaagtcacttcaaagaattaatgtcagaaagatggtgataatgaagcaaaagaaaggcagattatgctggccgggcgtggtggctcacgcctgtaatcccagcaatttgagaggctgagatcacttaaggtcaggagtttgagaccagcctgaccaacatggtgaaactccatctctactaaaaatacaaaaattagccaggcgtggtggtgcatgcctgtaatcccagctaatagagaggctgaggcaggagaatcacttgaatccagaaggcggaggttgccgtgagctgagactgtgccactacactccagcccggggtgacagagcaagactccatctcaaaaaaaaaagaaaagaaaacgaaagaaaaagaaaaaagaaaggcagattattctaattgaatgaataagaggctgagagtcaatacctagttccaacgcccttttgtttttgcagggtttttattggccactaactagctatgcaagctgattttaggcaagtttcatagcctctctgtgcctaaaattccttcacctgcaaaatggggataagaatgcctgcctacttacctcacagtgctgttatgagaattaattgttgtaatagttgtgactaaccattggcggggagaattctaagtactataccaatacaaatttcagcattttttcatatactgaaccctagcaaaaaaaaaaaaaattctgatgaacatcagattcaacctgtcattttacccggatgttgtgatgagccagcacttgtcccaggaggacgttgaatcagggacacgaaatctcagcacacagagattctagcatcattccaatagattggaccctgatttctgtttctgacatcctgttttttgtttgtgcgtgtttgggtccctggtcttttacccaaatcaaatgaaaagtgttgctcagaggcagaataaaaatggttttaagtaagcctgtgtaccacagtgtgtgaattgtgttttcttggggttccccaccttccagagatttccgtaaccaaaataagctcatctagtccagcatcagtccccagggaagagcccagagaggccagaggtggcgctagagaggcatcactctgaactaatttatggccagaaatgtccctctatgaggcactgaaaatgttggtcctattaaagtaaaaaaataaaataagaaaaatcttgtcattaaatgtgctccttggggtcaagagggccactgatttttgttgggcgtcccccaggtcctaagctctaagaaggacaaaatggtttttgttgggatgatgggcttgtccagagcttcctccaaagctaagactgcccctgctccactcgcaaaagcacagtttaaaaagagattggtggccgggcgcggtggctcacgcctgtaatcccagcacttcgggaggccgaggcaggtggatcataaagtcaggctagcgagaccatcctggctaacacagtgaaacccagtctctactaaaaatacaaaaaattagccgggcgtggtggcgggcgcctgtagtcccagctactcgggaggctgaggcaggagaatcgcttgaatccgggaggcggaggttgcagtgagccgagatcatgccactgcactccagcctgggcgacagagtgagattccgtatcaaaaaaaaaaaaaaggtgtattatcaaccaagagactccttcatcagccagttacaaaaactggctaaatagagcagaaaaagtagagtttaccctcacaagacggaaacttccagggatagcttcagaggcagctggatcctggtgcgcagggtttttgggaacgtgtccctttccaggtctcagccccaacttgctgagttcattttagtttaatagggacaatacgactgccaacagctttggactttttcctaccagcctgtggaaagacagtgtttcttccctaatagctccaggggggaaaaatggttcaattcaatataatgaacaactgatacaaaccagaaaccgacctatcaaaatggataccagtcattaacaaacaggtgtggccactgtaccaacataaatggatgctgtggccaggggtgtgtggtgccctcattggccaggcttgaagtcaggattcaatcactggaactgaatgtgaggtcagctccactcaaaccttatagattgagggtgcgggaaggatggttccccaaaggaaaaccaaagtactcttaccagaagaaggagagagatttgctaggcaaaaaaacaaaaacaaacaaacaaaaaaaacagcgtccatattaagcatgctgcttcttactataccttccatatgcagggcaaagtaatctaatggcttttctttttcttttcttttttttttttttttttgagatggagtttcactcattgcccaggctggagtgcaatggcacgatctctgctcactgcaacctccacctcccgggttcaagcgattctcctgcttcagcttcctgagtagctgggattacaggtgtgcaccaccacacctggctaattttttgtatttttagtagagactgggtttcaccatgttggccaggctggtctcgaactcctgacctcaggtgatccacccacctcggcctcccaaagtgctgggattacaggtgtgagccaccacacccagcctcctcatagcttttcaatttccccgtggtgttgtcactttcatccagctccttctctgaccagtatttatagagcacctgctcaaccacagaaactgggctggtggaaattccagaatgtttaagagagacccctgagaaggtggcagtagtctagtggggggaacagacacacacaaacaatgagaaggaaacatgagagtgcccagacagaggcataaacaaagtattgtgccatcactttgcaggagaacacactggctgtactaaagggaaggaagacagtccctgtcctaccattcttcgcagtgctgaggccaatagggctacagctcttgaagttgccctgtctctgcccacaagttatgggcagaaacagatgcagatataaaatcgctggcctcagctcctggatcagcaaattacctttggcctacagcaggacagctgcattcagcaaaacagcatgatgcacatatcttgatacgtaaccctagattcaggcttctaaatataagagacagttctgggccaccaattaccaaaaaaaaaaaaaaaaaaatcttgtaagataacgttcatactcatgggttacaaccaattcttaaaaaatactcacgaatattgaatatttaagtctggggaattgccctataaaaatatgtccctgcaccaaaacactttgaattctggtttggacaagcacaaagagaggcaggcataaagatgactcaggcatcacctacacttgctggagaagccacagaaagaaggaattccctttccaatacattcattcattcattccagtagacatctatttatcaggggtcaggagagggaagtatgaagttgcctctgtgcattgcctgcatgaggcatcagagagtttcatctcgagtacctgttccaaacctcgggtgagcagccagtcagacctgcaatgacccggtcacggcgttcatctctcttcctgtcccagtgtagaatttcccagtttgcacccacactggttcactgatgcacccaagctgtctgctcctggaactgtgaccaagtgtttactcccccaggtcacgtggaatcccatgcatggggactagttgtactagttgtactagttggagtgaaagtattgggaggaactcataaaaggccaaattctgcctatatagaaatggcctgatcacccccaagaaagaggacctaaagcacgcctagaagggaaggtaaataaatatttcttgagccattaccaaagctcatctaaacaattacagtagcttttttttttttttgagatggagtcttgctctgttgcccaggcttgagtacagtggcatgatcttggctcactgcaacctccgcctcccaggttcaagcaattcttctgcctcagcctcccgagtagctgggactacaggctagcaccaccatgcccagctaattttttgtatttttagtagagacggagttttgccatgttggccgggctggtctcgaactcctggcctcaagtgatccgcccacctcggcttcccaaagtgccaagattaaaggcatgagccacggcaccagtcctacagtagctttcttacagggctctctggtataacaaccattacaaacttaatgagttaaaacaacccaaatttattatcttgcagttctggaggtcagaagtctaaaacgggtcttgctggaccaaaatcaagatggcggcagggttggattcctttctggaagttcgtagagagaatcccttttcttgccttttccaccttctagaagctatccacatgccttgactcagggcctccttccatcttcaacggcagcaaagtcaccatttacttatttattatcttctttattatctacctcctccccttaagatgcctttttcacactgcatctcttttgttctgactccttttcctctctcttccccatttagggacccttgtcattactttgggtccacctggatgatccagaaaaatctccttattttaaggtcagctgattagcaaccttaattccatctgctcccttaattcctctttaccatgtaacccaacatattcacaagttccaggtgtttgtatggggatatcttttggcgagcattattctgtctactacatcttgctttgacatccattcgcttaaaaaacacacacagcagccagggttatctcacaacctagacttaatcacatcattcctctgctgaaacccaacccacacacccagtgaccacccacggaattaaaactcaaactttctttttttttggaagagatgggagtcttgctatgtggcccaggctagtctcaaacttctggcctcaagcaatcctcccacctctgcctccgaaagtgctgggattgtaggtgtaagccaccatacccagcctttaaaatccaaactttttttgtgtgtccttaaaaaggtctttattactaaaagctggaaggtcagtctttaacccccaatcacaaaatgctactttgcctcgacaagcaggctttttagttgagttggtgtctcttttgtagttaagacaagcatttgcccttgttgaccagtgatcaggaatccgttcttgtaattttgccctttcatccttgataggtgaaatcagtaccttttccacaactttgtttattcttcattttttttgtcttcggagtaaaagaccaagggacattaacaagttgatggtcccctagatatgggctctagtgccagcgagtctgttctcttcttcagtgtcaaaaggactgctcattctggagcatctactcttctggactaaaatccaaacttttttttattttttaacttcaagttctgggatacatgtgcagaacgtggaggtttgttacgtaggtatatgtgtgccatggtggtttgctgcacctatcaacctattatctaggttttaagccctgcatgcattaagcatttatcctaatgctctccctccctttgccccccacccccccgacaggccccagtgtgttatgttcccctccctgtgtccatgtgttctcattgttcaactcccacttatgagtgagaacatgcggtgttttaaaatccaaacttttaatgataccccgcaaagccctacatgatcagacccttggctgcctctcagatctcatcttctacctcgcccccactctactcagctgcagccacacactggccccaaacatgacaagatcattctggtctcaaggccttatgtgtgctgtttcctccattcataacaccattctccagattttcacatagctggtcctttcttccccatgccctaggtcacagtttctcagagaggatcaacctaacccccatctctaaggcaaccaccccacccctcatcacttgctattacaccaccctgttttacttcctccatggggtttgccaccactaacaatatttttatttaactgtttacttatttattatcttctttattatctatctcctccccctaggatgttgaccttgtgagggcagagaccttgtctgttctgttcactgatgtgtccccagcatctagactagggcttggcccatggcagatactctatagctatttgctgaatgagtgaaaggttcttttccccatgtgcccttcctcctggctaatgtccactcctttatctcagattaagtgcctcttgttcagaggtgccttctctgatatgccaacgtttcaagaacatgagggtctcccttttgcatgctcacacttccccgtggtttcactcaaggtcatatcacaatggtagttagatgcagtttgcacaattaccatttaatatctgtctttcccagcagatcatgagcccccatgagggcagggaccatgttcatcttgttcacctctgtcttcctggtccctagcttggtacctggcacataagtttccaatagttatttaatgaatgaatgaattaattaattaattaatgaggtagagagaaatggaagaagaaaactgagtcaaagcttcctccatcatcatagctttatttttacattgttatctgacaagatttaaacttgaattttaaagcaagatgaagctaaccaaggtattggctgtaaatcctgtctcaaaactttctcacatattccttatcgtgatggtttagaaaaaggaagaaatgaaaatcgacttataccaaaaaataatttcaagaagatagagacccggctgggcgcggtggctcatgcctgtaatcccagcactttgggaggccgaggtaggaggatcacctgaggtcagaacttcgagaacagcctggccaacatggtgaaacccaatgtctactaaaaatacaaaaattagccgagagtggtggtgcatgcttgtaatctcagctactcgggaagctgaggcaggagaatctcctgaacccaggtggcggaggttgcagtgagccgagattgtgccactgcactccagcctgggccacaagagcaaaactctgtctcaaaaaaacagaagaaaagaaaaagaaaaggagaagagaaaagaagagaaaaagaaaagatagagacccaaatgaaccccagcctcctttgtgcctgggatgccccctagtggaaaaaatggagaaagacaatttagagtgttccctaacaatttgacaaatatcgtatttctttgctttttatactctctgagttagtgtaggatccagaaacaaactggaagaaaatcacacagctttgatgaagcaaagaagcaagatgttctagagtaataaactttcagtaaaacaaaaactgagcaactgttgctttggaaccagatttttggctgatctctgatggtaatttttgggctatctcactctaagacttatttctgatatggaacttttcaaaaatgatgtagattcaattagtcacacctctgttccttagaaattcaaggtggataagatcatcaaatgccaacactggctcagcggggcttgttcttcagtctctatattctacaattctaaacttagctcttctgtcccacggtagttgtttaactattaaaaaaaaaaaaaaaaaaaaagggccgggcgcgttggctcacgcctgtaatcccagcactttgggaggccgaggtgagcggatcacgaggtaaggagatcaagaccaccctggctaacacgttgaaaccccgtctctactaaaaatacaaaaaattagccgggcgcggtggcgggcgcctgtactcccagctactcaggaggctgaggcaggagaatggcgtgaacccgggaggcggagtttgcagtgagcagagatggcgccactgcactccagcctgggcaatagagcaagactccatctcaaaaaaaaaaaaaaaagtgggtaactataataacaaacattatggcttgctatttgccagacattctgctaaacctttgacatgatctctcatttgatcattattaacaaccctagatataaataccattaacttctctttgcatctgaggaaactgagtcatggaagagttaaataatttgtctgaggcacaactgctgaatgttgggccatttgattttaaaatccatgatcttaatcattacactcaattaactcccataaatgataaactaactctcagagtttagttcataactaagcaaaaataacagaactactttctacgcataacagcgtgcaatgacctaatagcctattacccattgtccctaattcgttgcaaacttgacataaatttctgtgagatgaacttttacggccgatttgcattaattataacacattccttttgggattgcttatttgattttgttgttgttgttgttgttgttgttgtttttgagacggagtctcgctctgttgcccaggctggggtgcagtggcacaatctcagctcactgcaaccttcaccccccagattcaagtgattctcctgcctcagcctccccagtagctgggattacaggcatgagccaccacacccagctaatttttgtatttttagtagccatcgggttttgccatgttggccaggctggtcttgaactcctgaactcaagtgatctccccactttgacctcctaaagtgctgggattacaggcacaagccactgctcccggcctgcttattcgatatttaagaagctctgaggtctcacttcaatgtctaagatatattttctatgcacaataattaatatacacaggaaagaaaaaacagctacatttctactgttgaaggatatgagtccatccgagtatacgatttaggatgctttgggttgtaagcaacagaaaatccaactggctttaataagggcagttaccagttctcacaatggaaaatttcagatagaagacaaacttcaaggttggtttgattctgcacatcacaaatttaataggctatggctctgtttccctttgattttctcagctttgtccacctttgtgtattctttgacctcaaactggtttctctcatgggagtagctcttcaggctacaaacttcctcatcaatgtcctgagagaaggaaggcctctctaccctaaaccttcagacaaaagccccactgtattcttactgtaacagttaggtcatacaaccattcctgaacccagtgctccagtctgggttatgtgaccattccgaaaaaaactgcagcaagaagggtaggattgtccagtcaggacctgccttaagaattgctcagtaggccaggtgcagtggctcacacctataatcccagcactttgggaggcagaggtgggtggatcatgaggttaggcggtcaagaccatcctggccaacatggtgaaaccccgtctctactaaatatacaaaaaaaaaaaaaaattagctggatgtggtggcacatgcctgtaatcccagctactcgggaggctgaggcaggaaaatcacctgaaccagggagtcggaggttgcagtgagccgagatcattccactgcagtccagcctggcgacagagtgagactccgtctcaaaaaaaaaaaaaaaaaaaaaaaagaattgctcagtaaacagtagctcttagaaatttttattctaataaatgaaaatttctgtacccaagtaaagtataagtagaatgactaataatgaaaagttagtccacctcactcataaatcaacaaaagcataggaaaccaatggcatacaacttttattaatcagactaccaaaaaaatttaaaaattaataatgcttagtgttgaggaggatgtgagaaacagatatcacaaacatcattgctgcaacacttttggagagaaatttggcaatttctagcaaaagtgtaaaggtatgtacccttggacctagtgattccatattagaaattattcccactattttactcagaaaactatgatatgtgagctaggatatgtgaatcagtcacattgtatggatataccaaggcagtgttatgtgtgaaagtttaaaatgagaagcaaaaatgtccatcaatagagactaattagatttctggattttagtagtggaggagtaacttatattgggcaaattccattgcctagtacagctacaaactctgaacaaaacatttttacaaattaaagacacctgagaacaactaaaaactggagggtcagtaagaatcctcataaaatgggaatcatccacatttacccggcttttcctctgaagggtcacccagtctgcatagcacacagagaacagagctcaagccaaaagcaatagtcttattaggcagcagaatcacaggttagagtttggggcccccatggtggctgaaatttgatgagagaaatcccagaaatgatagagccacagaaaagggacctaaaaaatctgaatataaactcccctcaaatccttggctgactcaaactgtatttgtgaagcccgacagaaaacaaaaccaaaccaaaaagctggaggagaatgcaaagaactgcattgatcagtgctggggaggcagagtttggagctcaagttctaccaaattagagaaacttaaactcctcagtctttctgttgaaacccagaggggtcacaaattagtcagaaagaccacatccaagaactagtatgtagaaggcacaaaaccaaaatggatccacccaaaagaagtcccaaaccataccttcgtaacataagaacgagtcactagtaatttcactaccagttaaaacaaaactcaacaattttctgagaaagataatagaatccagagcctctgctatattatccacaatgtgcagtataaaattttaaaatcactgggccgggcacagtggctcacacctataatcccagcactttgggaggccgaggtggatggatcacgaggtcaggagatggagaccatctggctaacacggagaaaccccgtctctatcaaaaatacaaaaaattaaccaggcaaggtggtgggcatctgtactcccagctgcttgggaggctgaggcaggagaatggtgtgaacctgggaggcagaggttgcagtgagccgagatcacaccattgcactccagcctgggtgacagagcgagacgccacctcaaaaaaaaaaaaaaaaaaaaattaatcactaaacatgtgaaggagcaggaaactgtgatagtcaagagaaaaaatagttaatagaaacagacccaaagacaatgcagatgttgaaataagtaggcaaatattttacaataactccaatacatatgttaaagaatctagaggaatagattaataggtgaagaggtgatgagtttcatgaagctatgcaatgtaaaaaaaaattaaaaaattttttaaaaacccctgaaaatcctagaactaagaaaacaaatcctgaaataaattatttgtatgggattaagcatacagaagaaaggagcaatgatcttgaagacaggtaaataaaaattatccaaactgaagcagcagcaagaaaaaagatttaaagaaaaaaataagcagagcttcagtgatttgcagagaagtatcaagcattctaccatatatgtaattagagtcctaaaaataaaaggagagaaagaatggagcatttaaaaagtttgcttaagaaaaattgatttaaatgtttccaaatggtattaaaaatatcaacctacatatccaagaagctaaaaaaaaaaaaaacaaaaacccaatcaggataaatgcaaaggaaaacacacctaggcaaattactggaaaaagaaaaaatctaaaaggcagccagagggaaaaatgatacatcacgtacatggaaacaaaggtaaaaatgataattgacttctcttttttttcaggtcttggcatcaagacttgattctcatcagaaacaattaaatacagaatagagtagaatgacaactttaaaatgctgaaagaaaaaaggtgtcaagctctagtgaaaatattcttcaacaatgaaagcaaaataaagatatttttagttaaaaacttagagactttgttgccagcagatctgcattacaagaaatgctaaaggaagtcctttggcctacagggaaatgaaaccagatgggaattagtatttaaaggaaaaaaaatgaaaagtagtaggaatattaaatttgtgaataaatattaaagaccataaatctatggtctaatcaaaatctcagcaagactttttgtagaaactgacaagtggggtctaaaatttatatagaaaggcaaaagaactggaattgctgaaacaatattgacaaagaaaagcaaagttggagaagttacattgcctgatgtgaagacttgccataaaattacagtaattgagacagtgtgaagctgggcacagtggctcacacctgtaagctttaggaggctgaggtgggaggattatatgaggccaggagtttaagaccagcctagacaacatagcaagactccatctctacaattttctttaattagccagacatagtggtacatgaatatagtcttagccacttaggaggcttgagcccaggagttcaaggttacagtgaactatgatcatgcactgcactccagcatgggtgacaaagcgagacgctgtctcaaaaaaaaaaaaaaaaaaaaaaaaaaagacagtgtggtattgataagacagacacatagatcaatggaacaaaatagaaacttcacaaatagacccacacatatatggttaattgtttttgttttgttttgtttgtttttttgtttttttgttgttgttgtttttttgagacggagtctcgctctgtcgcccaggctggactgcggactgcagtggcgcaatggctcactgcaagctccgcttcccgggttcacgccattctcctgcctcagcctcccgagtagctgggactacaggcgcccgccaccgcgcccggctaattttttgtatttttagtagagacggggtttcaccttgttagccaggatggtctcgatctcctgacctcatgatccacccgcctcggcctcccaaagtgctgggattacaggtgagccaccgcgccaggcctgttttgttttgttttgagacagtctccctgtgttgcccaggctggtctgaactcctggcctcaagtgatcctcccacctcagcctctcaggtagctgggataacaagtatgagccaccactagattaagtcaatagattgttttttggttgtttgtttgtttgtttgttttgagacagagcctccctatgttgcccaggctggtctgaactcctggcctcaagtgatgctcccacctcagcctctaaggtagctgggacaacaagtgtgagccaccactagactaagccaattgatttttttttttttttttgagacagggtgtctctctgtctcccagctagagtgcaatgcgatcatggctcactgaagcctcaaccacctgggctcacatgatcctcctgcctcagccccacaagtagctggggccacaggtgcatgccaccatgtccagctaatttttttactttttgtagagatggggtctcactatgttgctcagggctggtctcaaactccttggctcaagcaatcctcccacctcgacctcccaaagtgctgggattacaggcataagccacggcacctggctgtaaattgatttttggcaaaggtgcaaaggtcatccaatggagaaagaatagtgttttcaacaaatgatgctggaataattggacatccatgtgcccacagatgaacttcaacccatagttcacaccatacataaaaattgattcaaaatagatcatagagctaaatgtaaaacctaaaatgatataatttctgaagaaaatataggaggatgtggagaaactggaactcttgtgtactgttagtgggaaatggtacagcggctatgaaaaacagtatggcaattccccaaaaattaaaaatagaattaccataggatctggcaattccatttctgtatacccaaaacaactcaaagggacatgaagaaatatttgtacacctgttttcttagaagcattattcacaatagccaaaaggtagaagcaacccaactgtccatcaatagatgaatggataaacaagctgtggtgtatacatacaaaatatgattcagccttaaaaaggaaggaaattctgatacatgctacagcatagatgaaactcaaagacattatgctaagtgaaataagccagttacagaagcacaaatactgtttgattccatacatctgagatacttgcagcagcaaaatttatacagacagaaagtaaaatggtgcttgctggggtcaagggtaagatggaatgaggagttactgtttaatgggcataaagtatcagttttgcaaaatgaaaaaactgtggatggatggtgatgatggctgcaaaacaatgtaaatgtacttaatgtcactgaactgtacactttaacatggataaaataataaagtttatgctatgtatatgtattaatcgcatttttcattttctatatcttatgaggcttgacatcttggggacttaccaacctgaaagagactgtttgtcccagggttagctcattccaagagatagcagatgaccttcctgcaatatgcagtccaaccaattcagagcccatactctgaaccacctcctctctctggcttttccactccgagaggcaagtttcccctgccctaatcatcccagggtcaggtatcagacagttagagactacccctatagcccacagctggcctgaattattcaaactatccaatcctaagccctaatcatcccagggtcaggtatcagacatttagagactacccctatagcccacagctggcctgaattattcaaactatccaatcctaagccctaatcatcccagggtcaggtgtcagacatttagagactaccccccccaaccccctatagcccacagctggcctgaattattcaaactatccaatcctaagccctaatcatcccagggttgggtgtcagacagttaggtacgacacctatagcccacagctggcctgaattattcagactatccaatcctaagcctgttcagctgcttaccttgcctcgcccattcctcctggcaaaaaccacaataaaggctttttcctaggctttcttctcatcctctctggctgtgaccaacctcaaagttctctcctgtggttctgcatggcatggcgggctcctgccccttgggaactgtattagactgttctcacactgctgtgaagaaatacctgatactaggtaatttataaagaaaaggggtttaattgactcacagttccccatggctgggaagccccaggaaacacaatcatggcagaaggagaagcaaacaaatccttcttcacaaggaggcaggagagagaag

SEQ ID NO: 12301 - protein, 1286 aa, Homo sapiens
  ref <308>: DATABASE ACCESSION NUMBER: SWISS-Prot / O14578
  ref <309>: DATABASE ENTRY DATE: 2002-06-15
VLDNQIKKDLADKETLENMMQRHEEEAHEKGKILSEQKAMINAMDSKIRSLEQRIVELSEANKLAANSSLFTQRNMKAQEEMISELRQQKFYLETQAGKLEAQNRKLEEQLEKISHQDHSDKNRLLELETRLREVSLEHEEQKLELKRQLTELQLSLQERESQLTALQAARAALESQLRQAKTELEETTAEAEEEIQALTAHRDEIQRKFDALRNSCTVITDLEEQLNQLTEDNAELNNQNFYLSKQLDEASGANDEIVQLRSEVDHLRREITEREMQLTSQKQTMEALKTTCTMLEEQVMDLEALNDELLEKERQWEAWRSVLGDEKSQFECRVRELQRMLDTEKQSRARADQRITESRQVVELAVKEHKAEILALQQALKEQKLKAESLSDKLNDLEKKHAMLEMNARSLQQKLETERELKQRLLEEQAKLQQQMDLQKNHIFRLTQGLQEALDRADLLKTERSDLEYQLENIQVLYSHEKVKMEGTISQQTKLIDFLQAKMDQPAKKKKVPLQYNELKLALEKEKARCAELEEALQKTRIELRSAREEAAHRKATDHPHPSTPATARQQIAMSAIVRSPEHQPSAMSLLAPPSSRRKESSTPEEFSRRLKERMHHNIPHRFNVGLNMRATKCAVCLDTVHFGRQASKCLECQVMCHPKCSTCLPATCGLPAEYATHFTEAFCRDKMNSPGLQTKEPSSSLHLEGWMKVPRNNKRGQQGWDRKYIVLEGSKVLIYDNEAREAGQRPVEEFELCLPDGDVSIHGAVGASELANTAKADVPYILKMESHPHTTCWPGRTLYLLAPSFPDKQRWVTALESVVAGGRVSREKAEADAKLLGNSLLKLEGDDRLDMNCTLPFSDQVVLVGTEEGLYALNVLKNSLTHVPGIGAVFQIYIIKDLEKLLMIAGEERALCLVDVKKVKQSLAQSHLPAQPDISPNIFEAVKGCHLFGAGKIENGLCICAAMPSKVVILRYNENLSKYCIRKEIETSEPCSCIHFTNYSILIGTNKFYEIDMKQYTLEEFLDKNDHSLAPAVFAASSNSFPVSIVQVNSAGQREEYLLCFHEFGVFVDSYGRRSRTDDLKWSRLPLAFAYREPYLFVTHFNSLEVIEIQARSSAGTPARAYLDIPNPRYLGPAISSGAIYLASSYQDKLRVICCKGNLVKESGTEHHRGPSTSRSSPNKRGPPTYNEHITKRVASSPAPPEGPSHPREPSTPHRYREGRTELRRDKSPGRPLEREKSPGRMLSTRRERSPGRLFEDSSRGRLPAGAVRTPLSQVNKVWDQSSV

SEQ ID NO: 12302 - DNA, 719 bp, Rattus norvegicus
  ref <308>: DATABASE ACCESSION NUMBER: EMBL / AF039308
  ref <309>: DATABASE ENTRY DATE: 2000-03-03
ttgcttatagagcgatacccgggatctcctggaagctatgctgctcgccagcacataatgcagagaattcagagacttcaagccgactgggtcttggaaatagacaccttcttgagtcagacaccctatggataccggtctttctcaagcatcatcagcaccctcaatcccactgctaaacgacacttggtcctcgcctgtcactacgactccaagtattttcacccttgggacaacagggtgtttgtgggagccactgattcagccgtgccatgtgcaatgttgttggaacttgcgccgtccttagacaagcaactcctttccttggagaaaattccagactccaagccagatccctcactccagctaattttctttgatggggaagaggctcttcttcattggtctcttcgtgattctctgtatggatctcggcacttagctcccaagatggcatcaaccccacacccacctggagcgaaagacaccaaccaactgcacggcatggatttattggtcttgttggatttaattggagcgcccaacccaacatttcccaaattttttccaaaatctgccagatggtttaatagacttgaagcgattgaacaagaactccacaaattaggtttactcaaggatcactctttggagaggtgctatttccagaatcatagttatggaggggcgattcaggatgaccatattccatttttaag

SEQ ID NO: 12303 - protein, 239 aa, Rattus norvegicus
  ref <308>: DATABASE ACCESSION NUMBER: SWISS-Prot / AAC28781
  ref <309>: DATABASE ENTRY DATE: 2002-06-01
LLIERYPGSPGSYAARQHIMQRIQRLQADWVLEIDTFLSQTPYGYRSFSSIISTLNPTAKRHLVLACHYDSKYFHPWDNRVFVGATDSAVPCAMLLELAPSLDKQLLSLEKIPDSKPDPSLQLIFFDGEEALLHWSLRDSLYGSRHLAPKMASTPHPPGAKDTNQLHGMDLLVLLDLIGAPNPTFPKFFPKSARWFNRLEAIEQELHKLGLLKDHSLERCYFQNHSYGGAIQDDHIPFL

SEQ ID NO: 12304 - DNA, 1573 bp, Homo sapiens
  ref <308>: DATABASE ACCESSION NUMBER: Refseq / NM_012413
  ref <309>: DATABASE ENTRY DATE: 2002-11-05
ggctgggagagatggcaggcggaagacaccggcgcgtcgtgggcaccctccacctgctgctgctggtggccgccctgccctgggcatccaggggggtcagtccgagtgcctcagcctggccagaggagaagaattaccaccagccagccattttgaattcatcggctcttcggcaaattgcagaaggcaccagtatctctgaaatgtggcaaaatgacttacagccattgctgatagagcgatacccgggatcccctggaagctatgctgctcgtcagcacatcatgcagcgaattcagaggcttcaggctgactgggtcttggaaatagacaccttcttgagtcagacaccctatgggtaccggtctttctcaaatatcatcagcaccctcaatcccactgctaaacgacatttggtcctcgcctgccactatgactccaagtatttttcccactggaacaacagagtgtttgtaggagccactgattcagccgtgccatgtgcaatgatgttggaacttgctcgtgccttagacaagaaactcctttccttaaagactgtttcagactccaagccagatttgtcactccagctgatcttctttgatggtgaagaggcttttcttcactggtctcctcaagattctctctatgggtctcgacacttagctgcaaagatggcatcgaccccgcacccacctggagcgagaggcaccagccaactgcatggcatggatttattggtcttattggatttgattggagctccaaacccaacgtttcccaatttttttccaaactcagccaggtggttcgaaagacttcaagcaattgaacatgaacttcatgaattgggtttgctcaaggatcactctttggaggggcggtatttccagaattacagttatggaggtgtgattcaggatgaccatattccatttttaagaagaggtgttccagttctgcatctgataccgtctcctttccctgaagtctggcacaccatggatgacaatgaagaaaatttggatgaatcaaccattgacaatctaaacaaaatcctacaagtctttgtgttggaatatcttcatttgtaatactctgatttagtttaggataattggttctagaattgaattcaaaagtcaaggcatcatttaaaataatctgatttcagacaaatgctgtgtggaaacatctatcctatagatcatcctattcttatgtgtctttggttatcagatcaattacagaataattgtgttgtgatattgtgtcctaaattgctcattaatttttatttacagattgaaaaagaggcaccgtgtaaagaaaatggcaaaataaatatctttccaaggatcatcatcacgatagctaaacagtacttaaatagcggttggaactaggtagcctttcgaattttatgattttttcatatgtggaaatctattacatgtaatacaaaacaaacatgtagtttgaaggcggtcagatttctttgagaaatctttgtagagttaattttatggaaattaaaatcagaattaaatgctaaaaaaaaaaaaaaaaa

SEQ ID NO: 12305 - protein, 361 aa, Homo sapiens
  ref <308>: DATABASE ACCESSION NUMBER: Refseq / NP_036545
  ref <309>: DATABASE ENTRY DATE: 2002-11-05
MAGGRHRRVVGTLHLLLLVAALPWASRGVSPSASAWPEEKNYHQPAILNSSALRQIAEGTSISEMWQNDLQPLLIERYPGSPGSYAARQHIMQRIQRLQADWVLEIDTFLSQTPYGYRSFSNIISTLNPTAKRHLVLACHYDSKYFSHWNNRVFVGATDSAVPCAMMLELARALDKKLLSLKTVSDSKPDLSLQLIFFDGEEAFLHWSPQDSLYGSRHLAAKMASTPHPPGARGTSQLHGMDLLVLLDLIGAPNPTFPNFFPNSARWFERLQAIEHELHELGLLKDHSLEGRYFQNYSYGGVIQDDHIPFLRRGVPVLHLIPSPFPEVWHTMDDNEENLDESTIDNLNKILQVFVLEYLHL

SEQ ID NO: 12306 - DNA, 1222 bp, Rattus norvegicus
  ref <308>: DATABASE ACCESSION NUMBER: EMBL / AF044910
  ref <309>: DATABASE ENTRY DATE: 2001-04-28
ctcggtccgtggtagcaggccatggcgatgggcagcggcggcgcgggctctgagcaggaagacaccgtgctgttccggcgtggcaccggccagagtgatgattctgacatttgggatgatacagcattgataaaagcttacgataaagccgtggcttcctttaagcatgctctaaagaacggtgacatgtgtgaaacttcagataagccagaaggcacagctagaagaaaacctgctaagaagaataaaaaccaaaagaagaatgccacagctccattgaaacagtggaaagctggtgacaaatgctctgccgtttggtcggaagatggctgcgtttacccagctaccatcacgtcagttgaccttaagagagaaacctgtgtcgtggtttatactggatatggaaacaaagaggagcaaaacctatctgatctgctttccccgacctgtgaagtagctaacaatacagaacagaacactcaggagaatgaaagccaagtttccacagacgacagtgaacactcctccagatcgctcagaagtaaagcacacagcaagtccaaagctgctccatggacctcgtttctccctccacctcccccggtgcccggggcgggattaggaccaggaaagccaggtctaaggttcaatggcccaccgccgccgccacctccccctcccccgttcttgccgtgttggatgcctccgttcccttcaggaccaccaataattcctccaccccctcccatatctcccgactgtctggatgacacggatgctctgggcagtatgctaatctcttggtacatgagtggttaccacactggttactatatgggtttcagacaaaataaaaaagaaggaaagaagtgctcacatacaaattaagaagttcagctctctcccaaggagatggtttgttggtgtccctggtcgataagaacagaagtctcctcgtcacctttgtggactcttggctaagtggtgtcatcatcagggtctccctgtcccgggagtccatcctgagtcagcagcagggcatgcatagagcagcagttggaggaaccgatcaatcgatcgatcagtggcagtgtgagtgcatggaagtcagccaaactgtgactgagcacaaacggacaattgcaattttcttagaatgtcaagatttgtattaatgcctttaaaattaaataaaagcccttttttgaaaaaaaaaaaaaaa

SEQ ID NO: 12307 - protein, 289 aa, Rattus norvegicus
  ref <308>: DATABASE ACCESSION NUMBER: SWISS-Prot / AAC01747
  ref <309>: DATABASE ENTRY DATE: 2002-06-15
MAMGSGGGAGSEQEDTVLFRRGTGQSDDSDIWDDTALIKAYDKAVASFKHALKNGDMCETSDKPKGTARRKPAKKNKNQKKNATAPLKQWKAGDKCSAVWSEDGCVYPATITSVDLKRETCVVVYTGYGNKEEQNLSDLLSPTCEVANNTEQNTQENESQVSTDDSEHSSRSLRSKAHSKSKAAPWTSFLPPPPPVPGAGLGPGKPGLRFSGPPPPPPPPPPFLPCWMPPFPSGPPIIPPPPPISPDCLDDTDALGSMLISWYMSGYHTGYYMGFRQNKKEGKKCSHTN

SEQ ID NO: 12308 - DNA, 1569 bp, Homo sapiens
  ref <308>: DATABASE ACCESSION NUMBER: Refseq / NM_022875
  ref <309>: DATABASE ENTRY DATE: 2001-03-09
ccacaaatgtgggagggcgataaccactcgtagaaagcgtgagaagttactacaagcggtcctcccggccaccgtactgttccgctcccagaagccccgggcggcggaagtcgtcactcttaagaagggacggggccccacgctgcgcacccgcgggtttgctatggcgatgagcagcggcggcagtggtggcggcgtcccggagcaggaggattccgtgctgttccggcgcggcacaggccagagcgatgattctgacatttgggatgatacagcactgataaaagcatatgataaagctgtggcttcatttaagcatgctctaaagaatggtgacatttgtgaaacttcgggtaaaccaaaaaccacacctaaaagaaaacctgctaagaagaataaaagccaaaagaagaatactgcagcttccttacaacagtggaaagttggggacaaatgttctgccatttggtcagaagacggttgcatttacccagctaccattgcttcaattgattttaagagagaaacctgtgttgtggtttacactggatatggaaatagagaggagcaaaatctgtccgatctactttccccaatctgtgaagtagctaataatatagaacagaatgctcaagagaatgaaaatgaaagccaagtttcaacagatgaaagtgagaactccaggtctcctggaaataaatcagataacatcaagcccaaatctgctccatggaactcttttctccctccaccaccccccatgccagggccaagactgggaccaggaaagccaggtctaaaattcaatggcccaccaccgccaccgccaccaccaccaccccacttactatcatgctggctgcctccatttccttctggaccaccaataattcccccaccacctcccatatgtccagattctcttgatgatgctgatgctttgggaagtatgttaatttcatggtacatgagtggctatcatactggctattatatggaaatgctggcatagagcagcactaaatgacaccactaaagaaacgatcagacagatctggaatgtgaagcgttatagaagataactggcctcatttcttcaaaatatcaagtgttgggaaagaaaaaaggaagtggaatgggtaactcttcttgattaaaagttatgtaataaccaaatgcaatgtgaaatattttactggactcttttgaaaaaccatctgtaaaagactgaggtgggggtgggaggccagcacggtggtgaggcagttgagaaaatttgaatgtggattagattttgaatgatattggataattattggtaattttatggcctgtgagaagggtgttgtagtttataaaagactgtcttaatttgcatacttaagcatttaggaatgaagtgttagagtgtcttaaaatgtttcaaatggtttaacaaaatgtatgtgaggcgtatgtggcaaaatgttacagaatctaactggtggacatggctgttcattgtactgtttttttctatcttctatatgtttaaaagtatataataaaaatatttaatttttttttaaa

SEQ ID NO: 12309 - protein, 282 aa, Homo sapiens
  ref <308>: DATABASE ACCESSION NUMBER: Refseq / NP_075013
  ref <309>: DATABASE ENTRY DATE: 2001-03-09
MAMSSGGSGGGVPEQEDSVLFRRGTGQSDDSDIWDDTALIKAYDKAVASFKHALKNGDICETSGKPKTTPKRKPAKKNKSQKKNTAASLQQWKVGDKCSAIWSEDGCIYPATIASIDFKRETCVVVYTGYGNREEQNLSDLLSPICEVANNIEQNAQENENESQVSTDESENSRSPGNKSDNIKPKSAPWNSFLPPPPPMPGPRLGPGKPGLKFNGPPPPPPPPPPHLLSCWLPPFPSGPPIIPPPPPICPDSLDDADALGSMLISWYMSGYHTGYYMEMLA

SEQ ID NO: 12310 - DNA, 1222 bp, Rattus norvegicus; identical to SEQ ID NO: 12306
  ref <308>: DATABASE ACCESSION NUMBER: EMBL / AF044910
  ref <309>: DATABASE ENTRY DATE: 2001-04-28

SEQ ID NO: 12311 - protein, 289 aa, Rattus norvegicus; identical to SEQ ID NO: 12307
  ref <308>: DATABASE ACCESSION NUMBER: SWISS-Prot / AAC01747
  ref <309>: DATABASE ENTRY DATE: 2002-06-15

SEQ ID NO: 12312 - DNA, 1569 bp, Homo sapiens; identical to SEQ ID NO: 12308
  ref <308>: DATABASE ACCESSION NUMBER: Refseq / NM_022875
  ref <309>: DATABASE ENTRY DATE: 2001-03-09

SEQ ID NO: 12313 - protein, 282 aa, Homo sapiens; identical to SEQ ID NO: 12309
  ref <308>: DATABASE ACCESSION NUMBER: Refseq / NP_075013
  ref <309>: DATABASE ENTRY DATE: 2001-03-09

SEQ ID NO: 12314 - DNA, 2330 bp, Rattus norvegicus
  ref <308>: DATABASE ACCESSION NUMBER: EMBL / AF059678
  ref <309>: DATABASE ENTRY DATE: 2000-03-03
gaattctgccaatgtattccgagcggcgataacggatacccctccagtcacgggcctgcccacctgctcctgttcggtcgtggggctgcgatggacattcggaaattctttggggttatatcaagtggaaaaaagcctgtaaatgagacagtaaagaagaatgagaagacaaaaccttcggagggcactgtcaaaggaaagcaaggagtaaaggaagccaaggttaataatccctgcaaagaggatgcctccagaccaaagcagcacaacaagaaaaagaggatcatctatgactcagattcagaatcagaggagacagtgcaagtaaaaaatgctaaaaagaaatcagaaaaattgccagtgtcttgtaaacctggtaaaatctctcggaaggatcctgttacctatatttctgagacagatgaagacgatgactttttatgtaaaaaggcagcctccaaatcaaaagagaatggagtatctacaaacagttaccttggagcatcaaacgtgaaaaagaatgaagaaaacactaagactaagagtaaaccgttatcaccaataaaactaacaccgacatcagtgcttgattattttggaactgaaagtgtccagagatctgggaagaagatggtggcgagcaaaaagaaagagtcttctcaaaccccagatgattccagattaaatgatgaggccatcgccaagcagcttcagcttgatgaagatgcagagctggagaggcagttgcatgaagatgaagaatttgcaagaacactggccttgttggatgaagaacctaagaccaaaaaggctcgaaaggactctgaagagggagaatcattttcacctgccaaagctgagttaagcaaagcagcaaagcagaagagccctgctaacgagcatttctcaattggaagaaagacctacagtcctgctaagtacggcaagggtagaggctcagaaggcaccaagcagccctgcagatcagctcaccagaaggaagcctgctcctctctcaaggccagctccaagtcggctcttatgaaagcacaagaagaaaattcttacaaagaaacagaactgctggctgcaaaaagagaaagtgccattgagcccaaaggagagaaaacaactcctaggaaaacgaaaggctctccaactaaaagagagtctgtaagcccagaagattctgaaaagaagcgcaccaattatcaagcttatcgaagctacttaaatcgagaaggtcccaaagccctgggctccaaagaaatacccaagggagctgaaaactgcttggagggcctgacgttcgtgatcaccggagtgctggagtccatcgaacgagaagaagccaagtctctaattgaacgttatggggggaaagtaacaggaaacgtgagcaagaaaaccagctacctcgtcatgggccgggacagcgggcagtccaagagtgacaaggcagcagctctgggaacaaaaatccttgatgaagacggcctgttggatctgattcgaactatgccgggcaaaaaatccaagtacgaaatcgctgctgaggctgagatgaagaaagaaaagtccaaattggagagaacaccccaaaaaaatgatcagggaaaaagaaaacttagtccaaccaagagggagttggagcctaaaaagagcaagctgactccccttaagcacagccctcggaaggcagtgaaggaggaggaacgtgtgtgtccgaggggcttggacgccaaggagcctcatggcagccacagtgccagcagagaggagtgcctgctctgggtggataagtacaagcccacctcactcaagaacataacggacagcagggtgaccagagctgtgccaacaaactgctacgctggctcagaaactggcacaagagttctccagaagagaaaaagcatgcagcaaaatttggcaaagttgccagcaaagatgatggctccagtttcaaggcagcactgctgtctggccctccaggtgttggcaaaaccactacagcttctcttgtgtgtcaggaattgggctacagttatgtggaactaaatgcgagcgatactcggagtaagaacagtctgaaagcaattgttgctgagtcattgaacaacaccagcatcaaaggcttttatacaagtggagcatctccttctgtaagtgcgaggcatgctctcatcatggatgaagttgatggcatggcgggcaatgaggacaggggtggaattcaggagctaataggcctgataaagcatacaaaattcccatcatttgtatgtgcaatgatagaaatcaccccaaaatccgctcattggttcatt

SEQ ID NO: 12315 - protein, 831 aa, Rattus norvegicus; identical to SEQ ID NO: 4796
  ref <308>: DATABASE ACCESSION NUMBER: PIR / S02003
  ref <309>: DATABASE ENTRY DATE: 1999-08-13

SEQ ID NO: 12316 - DNA, 4952 bp, Homo sapiens; identical to SEQ ID NO: 612
  ref <308>: DATABASE ACCESSION NUMBER: EMBL / L23320
  ref <309>: DATABASE ENTRY DATE: 1999-07-01

SEQ ID NO: 12317 - protein, 1149 aa, Homo sapiens
  misc_feature (1)..(1149): Xaa=Unknown amino acid
MDIRKFFGVIPSGKKLVSETVKKNEKTKSDEETLKAKKGIKEIKVNSSRKEDDFKQKQPSKKKRIIYDSDSESEETLQVKNAKKPPEKLPVSSKPGKISRQDPVTYISETDEEDDFMCKKAASKSKENGRSTNSHLGTSNMKKNEENTKTKNKPLSPIKLTPTSVLDYFGTGSVQRSNKKMVASKRKELSQNTDESGLNDEAIAKQLQLDEDAELERQLHEDEEFARTLAMLDEEPKTKKARKDTEAGETFSSVQANLSKAEKHKYPHKVKTAQVSDERKSYSPRKQSKYESSKESQQHSKSSADKIGEVSSPKASSKLAIMKRKKESSYKEIEPVASKRKENAIKLKGETKTPKKTKSSPAKKESVSPEDSEKKRTNYQAYRSYLNREGPKALGSKEIPKGAENCLEGLIFVITGVLESIERDEAKSLIERYGGKVTGNVSKKTNYLVMGRDSGQSKSDKAAALGTKIIDEDGLLNLIRTMPGKKSKYEIAVETEMKKESKLERTPQKNVQGKRKISPSKKESESKKSRPTSKRDSLAKTIKKETDVFWKSLDFKEQVAEETSGDSKARNLADDSSENKVENLLWVDKYKPTSLKTIIGQQGDQSCANKLLRWLRNWQKSSSEDKKHAAKFGKFSGKDDGSSFKAALLSGPPGVGKTTTASLVCQELGYSYVELNASDTRSKSSLKAIVAESLNNTSIKGFYSNGAASSVSTKHALIMDEVDGMAGNEDRGGIQELIGLIKHTKIPIICMCNDRNHPKIRSLVHYCFDLRFQRPRVEQIKGAMMSIAFKEGLKIPPPAMNEIILGANQDIRQVLHNLSMWCARSKALTYDQAKADSHRAKKDIKMGPFDVARKVFAAGEETAHMSLVDKSDLFFHDYSIAPLFVQENYIHVKPVAAGGDMKKHLMLLSRAADSICDGDLVDSQIRSKQNWSLLPAQAIYASVLPGELMRGYMTQFPTFPSWLGKHSSTGKHDRIVQDLALHMSLRTYSSKRTVNMDYLSLLRDALVQPLTSQGVDGVQDVVALMDTYYLMKEDFENIMEISSWGGKPSPFSKLDPKVKAAFTRAYNKEAHLTPYSLQAIKASRHSTSPSLDSEYNEELNEDDSQSDEKDQDAIETDAMIKKKTKSSKPSKPEKDKEPRKGKGKSSKKX

SEQ ID NO: 12318 - DNA, 2622 bp, Rattus norvegicus
  ref <308>: DATABASE ACCESSION NUMBER: EMBL / AF060174
  ref <309>: DATABASE ENTRY DATE: 1998-11-23
gcgcgctgcaggaagagtggcagaccgaagcggcctcgggctgcaaacggaggggcgctcgcgcggcgacggctgcagggctgacaccgctcagggcaggggggtcccaggcggctggaacgctctattctgaactgtgagtggatgatgctgttgcagccaagctgctgaacacactccgtggactcttccctgctgtgccttgcccatcggccgagataaaatggaagactcctacaaggataggacttcactgatgaagggcgccaaggacattgccaaagaggtgaagaagcaaacagtgaagaaggtgaaccaggcagtggaccgggcccaggatgaatacacccagcggtcctacagtcgattccaggatgaagatgatgatgatgactactacccacctggagaaacctacagtggggaggccaatgatgatgaaggctcaagtgaagccactgagggtcacgatgaagaagacgagatctatgaaggggaataccagggcatccccagcacgaaccaagggaaggacagcatagtgtctgtaggacaacccaaaggagatgagtacaaggaccgcagagagctggagtcagagaggagggctgatgaggaggagctcgcccagcagtatgagctgataatccaagagtgtggccatggccgtttccagtgggcccttttcttcgtcctgggcatggctctcatggcagacggcgtggaggtgtttgtggtgggctttgtgttacccagtgcagagacagacctatgcataccgaattcaggatctggatggctaggcagcatagtgtacctcgggatgatggtgggggcgttcttctggggaggactggcagacaaagtgggaaggaagcagtctcttctgatttgcatgtccgtcaacggattctttgccttcctttcttcatttgtccaaggttacggcttctttctcctctgtcgtttgctttcaggattcgggattggaggcgccattcccactgtgttctcctactttgctgaagtcctggcccgggagaagcgcggtgagcacctcagttggctctgcatgttctggatgattggcggtatctatgcttcagccatggcctgggccatcatcccccactatgggtggagcttcagcatgggctcagcctaccagttccacagctggcgcgtcttcgtcatcgtctgtgccctcccgtgcgtctcctcggtggtggccctcaccttcatgcccgaaagccctcggttcttgctggaggtaggaaaacatgatgaagcctggatgattctgaagctaattcatgataccaacatgagagcccggggccagccagagaaggtcttcacggtaaataaaatcaagactcccaagcaaatagatgagctgattgagattgagagcgacacaggaacctggtaccggaggtgttttgttcggatccgcacagaactgtacggaatttggttgacttttatgagatgcttcaactacccggtcagggaaaacaccataaagcttacgattgtttggttcaccctgtcctttgggtactatggactgtccgtttggttcccagatgtcattaaacacctccagtctgacgagtacgccctgctgactcggaatgtgcagaaggataaatatgcaaactttagcattaacttcaccatggaaaaccaggtccacaccggaatggaatatgacaatggcaggttcctcggagtcaaattcaaatcggtaaccttcaaggattcagtgtttaagtcctgcacctttgacgatgtgacctcagtcaacacctacttcaagaactgcacgtttattgataccctttttgagaacacagattttgagccctataaattcatagacagcgagtttcaaaactgctcgtttcttcacaataagacgggatgtcagattacttttgacgacgactacagtgcctactggatttactttgtcaactttctcgggacattggcagtgttaccaggaaatatcgtgtctgctctcctgatggacaggatcgggcgcttaacgatgctaggtggctccatggtgctctcggggatcagctgcttcttcctgtggtttggcaccagcgaatccatgatgataggcatgctgtgcttgtacaacggactgaccatctcagcgtggaactctcttgatgtagtcacggtggaactataccccacagaccggagagcaacgggctttggcttcttgaacgcactctgtaaagcagcggccgtcctgggaaacttaatattcggctccttggtcagcatcaccaaagcaatccctatcctgctggcttccaccgtgctcgtgtgtggaggactcgtggggctgcgcctgcccgacacaagaacccaggttctgatgtgacaaaagccattctcttctctcaccatgggtcagccctattgcctgactcaaggcttcagagtttttatgtatagaaaggtggccaagtatcagaactcaaacttttgctgtgacgtaaatgtagctgtgtattgtccccgccagtgtgatttgcagggtcctccccctcccccgcgccttgttatcttttcctaattgtgatgttcctgcttccg

SEQ ID NO: 12319 - protein, 727 aa, Rattus norvegicus
  ref <308>: DATABASE ACCESSION NUMBER: SWISS-Prot / AAC78628
  ref <309>: DATABASE ENTRY DATE: 2003-02-01
MEDSYKDRTSLMKGAKDIAKEVKKQTVKKVNQAVDRAQDEYTQRSYSRFQDEDDDDDYYPPGETYSGEANDDEGSSEATEGHDEEDEIYEGEYQGIPSTNQGKDSIVSVGQPKGDEYKDRRELESERRADEEELAQQYELIIQECGHGRFQWALFFVLGMALMADGVEVFVVGFVLPSAETDLCIPNSGSGWLGSIVYLGMMVGAFFWGGLADKVGRKQSLLICMSVNGFFAFLSSFVQGYGFFLLCRLLSGFGIGGAIPTVFSYFAEVLAREKRGEHLSWLCMFWMIGGIYASAMAWAIIPHYGWSFSMGSAYQFHSWRVFVIVCALPCVSSVVALTFMPESPRFLLEVGKHDEAWMILKLIHDTNMRARGQPEKVFTVNKIKTPKQIDELIEIESDTGTWYRRCFVRIRTELYGIWLTFMRCFNYPVRENTIKLTIVWFTLSFGYYGLSVWFPDVIKHLQSDEYALLTRNVQKDKYANFSINFTMENQVHTGMEYDNGRFLGVKFKSVTFKDSVFKSCTFDDVTSVNTYFKNCTFIDTLFENTDFEPYKFIDSEFQNCSFLHNKTGCQITFDDDYSAYWIYFVNFLGTLAVLPGNIVSALLMDRIGRLTMLGGSMVLSGISCFFLWFGTSESMMIGMLCLYNGLTISAWNSLDVVTVELYPTDRRATGFGFLNALCKAAAVLGNLIFGSLVSITKAIPILLASTVLVCGGLVGLRLPDTRTQVLM

SEQ ID NO: 12320 - DNA, 4069 bp, Rattus norvegicus; identical to SEQ ID NO: 916
  ref <308>: DATABASE ACCESSION NUMBER: EMBL / AF061266
  ref <309>: DATABASE ENTRY DATE: 1998-10-27

SEQ ID NO: 12321 - protein, 759 aa, Rattus norvegicus; identical to SEQ ID NO: 917
  ref <308>: DATABASE ACCESSION NUMBER: SWISS-Prot / AAC67387
  ref <309>: DATABASE ENTRY DATE: 2001-10-16

SEQ ID NO: 12322 - DNA, 3312 bp, Homo sapiens
  ref <308>: DATABASE ACCESSION NUMBER: EMBL / U31110
  ref <309>: DATABASE ENTRY DATE: 2000-03-04
gggacgattattaggaactagtcagttgcaaagctcattatgatggtattactatgaagaagattattacaaatgcatgggctgtgacgataacgttgtagatgtggtcgttacccagaaggttgcctggctggcccagctcggctcgaataaggaggcttagggctgtgcctaggactccagctcatgcgccgaataataggtatagtgttccaatgtctttgtggtttgtagagaatagtcaacggtcggcgaacatctcctcggagcgcagctgggccagcggttcccacagccctggagcccaacgtgcgcagaagcgcctcttggagctcctctcccacagatctctcgtcctcttcctgggctaggccgccccaggcgcgggccctgcgactcctggcacggccccgtgctcggctgccgccctggcgcgcgccacactgtcgtccccggacgggcgcggaccggctcggccggggcgccggcggctggggaggggtcgctggccccggggccgcgcatgcgccgccaccaacttggggctgtcagtggagggcgagtgctggttctcaggggaggcgacgccttcgggccaacgggcctcgagccgaggcagcagtgggaacgactcatcctttttccagccctggggcgtggctggggtcggggtcggggtcggggccggtgggggccccgcccccgtctcctggcctgcccccttcatgggccgcgatgatggcggccctgtacccgagcacggacctctcgggcgcctcctcctcctccctgccttcctctccatcctcttcctcgccgaacgaggtgatggcgctgaaggatgtgcgggaggtgaaggaggagaatacgctgaatgagaagcttttcttgctggcgtgcgacaagggtgactattatatggttaaaaagattttggaggaaaacagttcaggtgacttgaacataaattgcgtagatgtgcttgggagaaatgctgttaccataactattgaaaacgaaaacttggatatactgcagcttcttttggactacggttgtcagtctgcagatgcacttttggtggcaatcgactctgaagtagtgggagctgttgatatactacttaatcatcgaccaaaacgatcatcaagaccaactatagtaaaactaatggaacgaattcagaatcctgagtattcaacaactatggatgttgcacctgtcattttagctgctcatcgtaacaactatgaaattcttacaatgctcttaaaacaggatgtatctctacccaagccccatgcagttggctgtgaatgcacattgtgttctgcaaaaaacaaaaaggatagcctccggcattccaggtttcgtcttgatatatatcgatgtttggccagtccagctctaataatgttaacagaggaggatccaattctgagagcatttgaacttagtgctgatttaaaagaactaagtcttgtggaggtggaattcaggaatgattatgaggaactagcccggcaatgtaaaatgtttgctaaggatttacttgcacaagcccggaattctcgtgaattggaagttattctaaaccatacgtctagtgacgagcctcttgacaaacggggattattagaagaaagaatgaatttaagtcgtctaaaacttgctatcaaatataaccagaaagagtttgtctcccagtctaactgccagcagttcctgaacactgtttggtttggacagatgtcgggttaccgacgcaagcccacctgtaagaagataatgactgttttgacagtaggcatcttttggccagttttgtcactttgttatttgatagctcccaaatctcagtttggcagaatcattcacacaccttttatgaaatttatcattcatggagcatcatatttcacatttctgctgttgcttaatctatactctcttgtctacaatgaggataagaaaaacacaatggggccagcccttgaaagaatagactatcttcttattctgtggattattgggatgatttggtcagacattaaaagactctggtatgaagggttggaagactttttagaagaatctcgtaatcaactcagttttgtcatgaattctctttatttggcaacctttgccctcaaagtggttgctcacaacaagtttcatgattttgctgatcggaaggattgggatgcattccatcctacactggtggcagaagggctttttgcatttgcaaatgttctaagttatcttcgtctcttttttatgtatacaaccagctctatcttgggtccattacagatttcaatgggacagatgttacaagattttggaaaatttcttgggatgtttcttcttgttttgttttctttcacaattggactgacacaactgtatgataaaggatatacttcaaaggagcagaaggactgtgtaggcatcttctgtgaacagcaaagcaatgataccttccattcgttcattggcacctgctttgctttgttctggtatattttctccttagcgcatgtggcaatctttgtcacaagatttagctatggagaagaactgcagtcctttgtgggagctgtcattgttggtacatacaatgtcgtggttgtgattgtgcttaccaaactgctggtggcaatgcttcataaaagctttcagttgatagcaaatcatgaagacaaagaatggaagtttgctcgagcaaaattatggcttagctactttgatgacaaatgtacgttacctccacctttcaacatcattccctcaccaaagactatctgctatatgattagtagcctcagtaagtggatttgctctcatacatcaaaaggcaaggtcaaacggcaaaacagtttaaaggaatggaggaatttgaaacagaagagagatgaaaactatcaaaaagtgatgtgctgcctagtgcatcgttacttgacttccatgagacagaagatgcaaagtacagatcaggcaactgtggaaaatctaaacgaactgcgccaagatctgtcaaaattccgaaatgaaataagggatttacttggctttcggacttctaaatatgctatgttttatccaagaaattaaccattttctaaatcatggagcgaataattttcaataacagatccaaaagactatattgcataacttgcaatgaaattaatgagatatatattgaaataaagaattatgtaaaagccgttcctttaaaatatttatagcattaaatatatgttatgtaaagtgtgtatatagaattagttttttaaaccttctgtt

SEQ ID NO: 12323 - protein, 793 aa, Homo sapiens; identical to SEQ ID NO: 919
  ref <308>: DATABASE ACCESSION NUMBER: SWISS-Prot / P48995
  ref <309>: DATABASE ENTRY DATE: 2001-10-16

SEQ ID NO: 12324 - DNA, 852 bp, Rattus norvegicus
  ref <308>: DATABASE ACCESSION NUMBER: EMBL / AF061945
  ref <309>: DATABASE ENTRY DATE: 1999-02-04
ctagacgccttcatcatggacaaagcccttctggattatgaagtgtcaatagatgctgactgcaagcttctgaccgtaggaaagccatttgccatcgaaggatatggcattggtctccctccaaactctccattgacctctaatatatctgagctcatcagtcagtacaagtctcacgggtttatggatgtgctccatgacaagtggtacaaggtggttccctgcggaaagagaagctttgccgtcactgagactttgcaaatgggcatcaagcacttctctggactcttcgtgctgttgtgtataggatttggtctctccatcctgaccaccattggtgaacacatagtgcacagactgctgttaccacgcatcaaaaacaaatccaagctgcagtactggctgcacacgagtcagaggtttcacagagcattaaacacgtcattcgtagaagaaaagcagccacgttccaagacaaaacgtgtggagaagagcagatggagaagatggacctgcaagacagaaggggactctgaattgtctctgtttcctaggtccaacctgggaccccagcagctcatggtatggaatacttccaatctgagtcatgacaaccaacgaaaatacatctttaatgacgaggaaggacaaaaccagctgggtacccaggcccaccaggacatccctctccctcagaggagaagagagctccctgcctcactgaccaccaatgggaaagcagactccctcaatgtaactcggagctccgtgattcaggaactctctgagttggagaagcagatccaagtgatccgccaggagctgcagttggctgtaagcaggaagacagag

SEQ ID NO: 12325 - protein, 284 aa, Rattus norvegicus
  ref <308>: DATABASE ACCESSION NUMBER: SWISS-Prot / AAD11811
  ref <309>: DATABASE ENTRY DATE: 2002-06-01
LDAFIMDKALLDYEVSIDADCKLLTVGKPFAIEGYGIGLPPNSPLTSNISELISQYKSHGFMDVLHDKWYKVVPCGKRSFAVTETLQMGIKHFSGLFVLLCIGFGLSILTTIGEHIVHRLLLPRIKNKSKLQYWLHTSQRFHRALNTSFVEEKQPRSKTKRVEKSRWRRWTCKTEGDSELSLFPRSNLGPQQLMVWNTSNLSHDNQRKYIFNDEEGQNQLGTQAHQDIPLPQRRRELPASLTTNGKADSLNVTRSSVIQELSELEKQIQVIRQELQLAVSRKTE

SEQ ID NO: 12326 - DNA, 852 bp, Rattus norvegicus; identical to SEQ ID NO: 12324
  ref <308>: DATABASE ACCESSION NUMBER: EMBL / AF061945
  ref <309>: DATABASE ENTRY DATE: 1999-02-04

SEQ ID NO: 12327 - protein, 284 aa, Rattus norvegicus; identical to SEQ ID NO: 12325
  ref <308>: DATABASE ACCESSION NUMBER: SWISS-Prot / AAD11811
  ref <309>: DATABASE ENTRY DATE: 2002-06-01

SEQ ID NO: 12328 - DNA, 852 bp, Rattus norvegicus; identical to SEQ ID NO: 12324
  ref <308>: DATABASE ACCESSION NUMBER: EMBL / AF061945
  ref <309>: DATABASE ENTRY DATE: 1999-02-04

SEQ ID NO: 12329 - protein, 284 aa, Rattus norvegicus; identical to SEQ ID NO: 12325
  ref <308>: DATABASE ACCESSION NUMBER: SWISS-Prot / AAD11811
  ref <309>: DATABASE ENTRY DATE: 2002-06-01

SEQ ID NO: 12330 - DNA, 852 bp, Rattus norvegicus; identical to SEQ ID NO: 12324
  ref <308>: DATABASE ACCESSION NUMBER: EMBL / AF061945
  ref <309>: DATABASE ENTRY DATE: 1999-02-04

SEQ ID NO: 12331 - protein, 284 aa, Rattus norvegicus; identical to SEQ ID NO: 12325
  ref <308>: DATABASE ACCESSION NUMBER: SWISS-Prot / AAD11811
  ref <309>: DATABASE ENTRY DATE: 2002-06-01

SEQ ID NO: 12332 - DNA, 1750 bp, Rattus norvegicus; identical to SEQ ID NO: 962
  ref <308>: DATABASE ACCESSION NUMBER: EMBL / AF062741
  ref <309>: DATABASE ENTRY DATE: 1998-07-10

SEQ ID NO: 12333 - protein, 530 aa, Rattus norvegicus; identical to SEQ ID NO: 963
  ref <308>: DATABASE ACCESSION NUMBER: SWISS-Prot / AAC40168
  ref <309>: DATABASE ENTRY DATE: 2001-10-16

SEQ ID NO: 12334 - DNA, 3830 bp, Homo sapiens
  ref <308>: DATABASE ACCESSION NUMBER: Refseq / XM_043826
  ref <309>: DATABASE ENTRY DATE: 2002-08-01
gactagggaccgcctgggtgaggtgaggacctggtggccgcagttgtggcactgtgcgcaggcgctgaactgaccggacggagcgggcggctgtggcctcgccagctggtttaaaaatatccttttttgctgaaggaacacatttgctggtatagtttcagaatgtcaagtactgtgtcctactggatcttaaattctacaaggaacagcattgccacattgcaagggggtagacgcttatactccaggtatgtctcaaataggaataaattaaaatggaggctcttttcccgggtgccacccaccctaaacagttccccatgtggtggctttactctgtgcaaagcctacagacacacatcaacagaggaagatgattttcacttgcaactcagccctgagcagataaatgaagtgcttcgagctggcgagacaacccacaagattcttgaccttgaaagcagagtcccaaattcagtgttgcggtttgagagcaaccagctggctgccaattccccagtggaggaccggcgaggtgtagcctcctgcctgcaaaccaatggactgatgtttggcatcttcgatggacatggtggtcatgcatgtgcccaagcagtgagcgagaggctcttctactatgtggcagtgtccctgatgtcccaccagaccctggagcacatggagggagctatggaaagcatgaaacccttgctgcccatcctgcattggctcaagcacccaggggacagtatctacaaggatgtcacatctgtgcatcttgaccacctccgtgtctattggcaggaactgcttgatttgcacatggaaatgggactaagcattgaagaagcattaatgtactccttccagagactggattctgacatctcgctggaaatccaggcccccctggaagatgaggtgacaaggaacctgtcactccaggttgctttctctggggcaacagcttgcatggcccatgttgatggaattcacttgcacgtggcaaatgctggtgactgccgagccatccttggtgtccaagaggacaatggcatgtggtcttgtctgccccttacacgtgaccacaatgcctggaaccaggccgagctgtcccggctaaagagggagcaccctgagtcagaggacaggacgatcatcatggaggacaggctactgggcgtcctcatcccctgcagggcctttggggatgttcagctgaagtggagtaaagagttgcagcgcagcattctggagaggggcttcaataccgaggccctcaacatttaccagttcacacccccacactactacactccaccctacctgactgctgagcctgaggtcacataccacaggctgaggccccaggataagttccttgtgctggcctcagatggcctgtgggacatgctgagcaatgaggacgtggtaaggctggtggtggggcacctggctgaggcagattggcacaagacagacctggcccagagacccgccaacttggggctcatgcagagcctgctgctgcagaggaaagccagcgggctccacgaggctgaccaaaatgcagccacgcggctgatcagacatgccatcgggaacaatgagtatggggagatggaggcagagcggctggcggcgatgctgacattgccagaggacttggcgaggatgtacagggatgatatcactgtcactgtggtgtattttaactcagaatcaatcggtgcatattacaaggggggttaagaatctcccatcctattgtcaaggttaacataaatgctcttctaaaatgtttcacttactcctaaactagctatccaaaccttactattaaaagcgcaggcagatttaatttgctaaatagactaacaggaggaaaaaaacaaacagcctagctttaaaaaacagtgaaatagcagtgatttcatgtccctgtatgttctgattaagtcttatatgcagagaggacagagcataaagtctatagaattggcttgggcttgtgtagccccagtcatttgataaagatgttgttaaactgtgtcagcctgagccttcaaagggtaaatttaatcatgattctgagaataaagaacttcaggagcttcttaggtcttgccacaaaaatctgcaaatttgataattctcctgaattcacaatcatggacttgtagactatgaagagatattttatttgtttgtcttttatttaaattactaaggtctaggtttacaaagcatactacaggacccttttctatgcaatatcctaacttttttttttgtgattatgcttgtgagaaattttgtaatactacattctagttctgttttcgtttattttaaaactgaatccttaaacttgcaaacacgcctactgtaagcatgcttggaatgacttgttttggttttcagctgataggatctatgcctctggaccagctgaacttactggtgcagctttttgtgccctctactgagtcccattccagaaactttgagccatgctaggaggtaactagtctatgccttaactcctgacctttcctgcattagtaaaatttcctcctgggctgagcctttgggggttgattcacagcatttaagctttctgattatacctctcaaacattcttctgtcaattccacacaatccttctacctctgctatgctgaacccctcattcaccctgcacctgccaactgcaaaatattgtctgaaagaatctttcacatgttcctgcttcctatggctgcaggaaaggagaaaatgtgattgcatgtggtagttgtggtgatagacgtttagacaggacaggttaatttagcggattgtggacttaagattcaacctctatctggagaggtgaaaacacaaaggcttaaggacaacagtttctaaccaagtttctctgaatcctttcctgagaggtggtgggcaggagggaggagtgagacttatcagatgggacgcttgccccaagactgtgggataaaccaccattgctagtcctcaggaattagaccatatttagtataggagttggggcaaaaataaaagtgtaatttgtaatggtttctgtgggctgtagactctttgtatttacttggaaattcagttatgtggatccattttggagatgaatttcatctcatgagttgctgtggcatttaaacaacaggaaatgtgtccctaaatggaaacaaatataatcccacaaaaccaacagttttatttgcctctactacgtcaggcagaattcttcaattaagttgaactacatttgttgatcccttttctcatcttacccctttatgccacctactgaaaagaaaaacaaatagctaggtttggtttcctgttttttgtctatgtcccagctgacattcagtcaaatgttgggatacttctaatttggtggtgtttctttgtacatttttcagtgcaactgtttagtcatgtgttttcatctaagaaattatcttttgaatatttaagccttgatccttttattctgaaaccattaatattccttcttggctgggtgcagtagtttacgcctgtaatcccagcactgtgggaggccgaggcggatggatcacctgaggtcgggaattcgagaccagcctgaccaacatggagaaactccatctctactaaaaatacaaaattagccaggtgtggtggtgcatgcctgtaatcccagctactcgggaggctgaggcaggaaaatcacttgaacccgggaggcggaggttgcggtgagccaagatcgcaccattgcactccagcctgggcaacaagagtgaaactctgtctc

SEQ ID NO: 12335 - protein, 529 aa, Homo sapiens; identical to SEQ ID NO: 965
  ref <308>: DATABASE ACCESSION NUMBER: SWISS-Prot / Q9P2J9
  ref <309>: DATABASE ENTRY DATE: 2002-06-15

SEQ ID NO: 12336 - DNA, 5413 bp, Rattus norvegicus; identical to SEQ ID NO: 982
  misc_feature (1)..(5413): n=a, c, g or t
  ref <308>: DATABASE ACCESSION NUMBER: EMBL / AF063103
  ref <309>: DATABASE ENTRY DATE: 2000-03-03

SEQ ID NO: 12337 - protein, 1550 aa, Rattus norvegicus; identical to SEQ ID NO: 983
  ref <308>: DATABASE ACCESSION NUMBER: SWISS-Prot / AAC77816
  ref <309>: DATABASE ENTRY DATE: 2003-02-01

SEQ ID NO: 12338 - DNA, 5413 bp, Rattus norvegicus; identical to SEQ ID NO: 982
  misc_feature (1)..(5413): n=a, c, g or t
  ref <308>: DATABASE ACCESSION NUMBER: EMBL / AF063103
  ref <309>: DATABASE ENTRY DATE: 2000-03-03

SEQ ID NO: 12339 - protein, 1550 aa, Rattus norvegicus; identical to SEQ ID NO: 983
  ref <308>: DATABASE ACCESSION NUMBER: SWISS-Prot / AAC77816
  ref <309>: DATABASE ENTRY DATE: 2003-02-01

SEQ ID NO: 12340 - DNA, 5413 bp, Homo sapiens; identical to SEQ ID NO: 982
  misc_feature (1)..(5413): n=a, c, g or t
  ref <308>: DATABASE ACCESSION NUMBER: EMBL / AF063103
  ref <309>: DATABASE ENTRY DATE: 2000-03-03

SEQ ID NO: 12341 - protein, 1550 aa, Homo sapiens; identical to SEQ ID NO: 983

SEQ ID NO: 12342 - DNA, 1705 bp, Rattus norvegicus
  ref <308>: DATABASE ACCESSION NUMBER: EMBL / AF063302
  ref <309>: DATABASE ENTRY DATE: 1998-11-11
atggcggaagcacaccaggcagtagctttccagttcactgtgaccccagacggggtcgacttccggcttagtcgggaggctctgagacacatctacctgtctggaatcaactcctggaagaaacgccttattcgaatcaaggtgtgggttgattctccgtgtggttctccggggcctcttttttcccagcaggtgcttaggcagaagccagctgtcagaaactaagtctcattgtcagtatctgtctcgcttttcacaagcagtgctggtggttatagatagcctctatccagtagtgcagaagccagaaaatgagatgtggttgggacatacagtgtaggtgtacgagatggacgaagaacaccatgaatggatgagggaaccaggagccctttctcaagacttcccagggtcctagtgatgttctcctactccagtaggatgcctgtttcttccctacagaatggtatccttaggggtgtgtaccctggcagccctaccagctggctggttgttgtcatggcaacagttggttccaactactgcaaagtggacatctccatggggctggtccattgcatccagagatgcctcccgacaaggtaagacacatggaagacacaaagtttcagaaaaaaggggcagaacagttcccagtggaggattcatgtactgaacagattcataaaatgagtcattggtgggcaagggtctctcacagggctgccagctctcagttccaaggcagtttgtaattggtacactccgacctgagtgctccagaggggtcttttacccatttctgccccaaggagggagttcacaagccaaccagtacagtcagaattccctgaaggaaaggcctcaaaggggtaccctgaagtctccccttctctaacaggtatggctcctacgggaccccacagaccgagacacttctcagtatggtcatcttctccaccggagtctgggcgacaggcatttttttattccgacaaaccctgaagctgctgctttcctatcatgggtggatgttcgagatgcacagcaagaccagccatgccaccaagatctgggctgtgagcagaagcactggagggtgcaggcatctggcccgagatcatggggaatctcatttggggttccgagcaagaaggggagaggaggactggccaccagctgctttggtgcctgggttcgtcctgaagtagctgggatggttctgaaggtcttagttgttttctcatgtgcgcccattcttcctaatagcccccctaccccaacgctgtactctgtactctttagatctgtgttcgtctcctgtccagccggcggcccatgctctatagcttccaaacatcactgcccaagcttcctgtccccagtgtgccagccacaattcaccgggtaagagcctgagtaccaatgagccccaaaatcctccattcccagaaccggtccaaacagataaggattggtttgagaagaacggggtctggtggagaagaggtggcgaaaaggttaggatggaggtaaccgtcctcatgataataatttggctgaacagtacttggattctgtgcggcccttgctggatgacgaagcctatttccgcatggagtcgttggccaaagaattccaggacaagattgcccccagactgcagaaatacctggtgctgaagtcatggtgggcaaccaactat

SEQ ID NO: 12343 - protein, 199 aa, Rattus norvegicus
  ref <308>: DATABASE ACCESSION NUMBER: SWISS-Prot / AAC72745
  ref <309>: DATABASE ENTRY DATE: 2002-06-01
MAEAHQAVAFQFTVTPDGVDFRLSREALRHIYLSGINSWKKRLIRIKNGILRGVYPGSPTSWLVVVMATVGSNYCKVDISMGLVHCIQRCLPTRYGSYGTPQTETLLSMVIFSTGVWATGIFLFRQTLKLLLSYHGWMFEMHSKTSHATKIWAYLDSVRPLLDDEAYFRMESLAKEFQDKIAPRLQKYLVLKSWWATNY

SEQ ID NO: 12344 - DNA, 2576 bp, Homo sapiens
  ref <308>: DATABASE ACCESSION NUMBER: EMBL / U62733
  ref <309>: DATABASE ENTRY DATE: 1999-07-01
ccgcgcacccatctgcccccgtcctaggtgccgaccaacccccaggatggcggaagctcaccaggccgtggccttccagttcacggtgaccccagacggggtcgacttccggctcagtcgggaggccctgaaacacgtctacctgtctgggatcaactcctggaagaaacgcctgatccgcatcaagaatggcatcctcaggggcgtgtaccctggcagccccaccagctggctggtcgtcatcatggcaacagtgggttcctccttctgcaacgtggacatctccttggggctggtcagttgcatccagagatgcctccctcaggggtgtggcccctaccagaccccgcagacccgggcacttctcagcatggccatcttctccacgggcgtctgggtgacgggcatcttcttcttccgccaaaccctgaagctgcttctctgctaccatgggtggatgtttgagatgcatggcaagaccagcaacttgaccaggatctgggctatgtgtatccgccttctatccagccggcaccctatgctctacagcttccagacatctctgcccaagcttcctgtgcccagggtgtcagccacaattcagcggtacctagagtctgtgcgccccttgttggatgatgaggaatattaccgcatggagttgctggccaaagaattccaggacaagactgcccccaggctgcagaaatacctggtgctcaagtcatggtgggcaagtaactatgtgagtgactggtgggaagagtacatctaccttcgaggcaggagccctctcatggtgaacagcaactattatgtcatggaccttgtgctcatcaagaatacagacgtgcaggcagcccgcctgggaaacatcatccacgccatgatcatgtatcgccgtaaactggaccgtgaagaaatcaagcctgtgatggcactgggcatagtgcctatgtgctcctaccagatggagaggatgttcaacaccactcggatcccgggcaaggacacagatgtgctacagcacctctcagacagccggcacgtggctgtctaccacaagggacgcttcttcaagctgtggctctatgagggcgcccgtctgctcaagcctcaggatctggagatgcagttccagaggatcctggacgacccctccccacctcagcctggggaggagaagctggcagccctcactgcaggaggaagggtggagtgggcgcaggcacgccaggccttctttagctctggaaagaataaggctgccttggaggccatcgagcgtgccgctttcttcgtggccctggatgaggaatcctactcctatgaccccgaagatgaggccagcctcagcctctatggcaaggccctgctacatggcaactgctacaacaggtggtttgacaaatccttcactctcatttccttcaagaatggccagttgggtctcaatgcagagcatgcgtgggcagatgctcccatcattgggcacctctgggagtttgtcctgggcacagacagcttccacctgggctacacggagaccgggcactgcctgggcaaaccgaaccctgcgctcgcacctcctacacggctgcagtgggacattccaaaacagtgccaggcggtcatcaagagttcctaccaggtggccaaggcgttggcagacgacgtggagttgtactgcttccagttcctgccctttggcaaaggcctcatcaagaagtgccggaccagccctgatgcctttgtgcagatcgcgctgcagctggctcacttccgggacaggggtaagttctgcctgacctatgaggcctcaatgaccagaatgttccgggagggacggactgagactgtgcgttcctgtaccagcgagtccacagcctttgtgcaggccatgatggaggggtcccacacaaaagcagacctgcgagatctcttccagaaggctgctaagaagcaccagaatatgtaccgcctggccatgaccggggcagggatcgacaggcacctcttctgcctttacttggtctccaagtacctaggagtcagctctcctttccttgctgaggtgctctcggaaccctggcgtctctccaccagccagatcccccaatcccagatccgcatgttcgacccagagcagcaccccaatcacctgggcgctggaggtggctttggccctgtagcagatgatggctatggagtttcctacatgattgcaggcgagaacacgatcttcttccacatctccagcaagttctcaagctcagagacgaacgcccagcgctttggaaaccacatccgcaaagccctgctggacattgctgatcttttccaagttcccaaggcctacagctgaagcccttaggtacctgtgttttgtttgggaactcggaggccctccccctcccccagctcagaccacagaggtggcaagagaagggctgaagctggaagactgttcatgagggacttgtgtgacctgctttgaaatgtgtgactctgctgagtgacgtaggctctgagatagctgtccacgcccacgtgtttgcttggaataaatacttgcc

SEQ ID NO: 12345 - protein, 772 aa, Homo sapiens
  ref <308>: DATABASE ACCESSION NUMBER: SWISS-Prot / AAC51122
  ref <309>: DATABASE ENTRY DATE: 2001-10-16
MAEAHQAVAFQFTVTPDGVDFRLSREALKHVYLSGINSWKKRLIRIKNGILRGVYPGSPTSWLVVIMATVGSSFCNVDISLGLVSCIQRCLPQGCGPYQTPQTRALLSMAIFSTGVWVTGIFFFRQTLKLLLCYHGWMFEMHGKTSNLTRIWAMCIRLLSSRHPMLYSFQTSLPKLPVPRVSATIQRYLESVRPLLDDEEYYRMELLAKEFQDKTAPRLQKYLVLKSWWASNYVSDWWEEYIYLRGRSPLMVNSNYYVMDLVLIKNTDVQAARLGNIIHAMIMYRRKLDREEIKPVMALGIVPMCSYQMERMFNTTRIPGKDTDVLQHLSDSRHVAVYHKGRFFKLWLYEGARLLKPQDLEMQFQRILDDPSPPQPGEEKLAALTAGGRVEWAQARQAFFSSGKNKAALEAIERAAFFVALDEESYSYDPEDEASLSLYGKALLHGNCYNRWFDKSFTLISFKNGQLGLNAEHAWADAPIIGHLWEFVLGTDSFHLGYTETGHCLGKPNPALAPPTRLQWDIPKQCQAVIESSYQVAKALADDVELYCFQFLPFGKGLIKKCRTSPDAFVQIALQLAHFRDRGKFCLTYEASMTRMFREGRTETVRSCTSESTAFVQAMMEGSHTKADLRDLFQKAAKKHQNMYRLAMTGAGIDRHLFCLYLVSKYLGVSSPFLAEVLSEPWRLSTSQIPQSQIRMFDPEQHPNHLGAGGGFGPVADDGYGVSYMIAGENTIFFHISSKFSSSETNAQRFGNHIRKALLDIADLFQVPKAYS

SEQ ID NO: 12346 - DNA, 1705 bp, Rattus norvegicus; identical to SEQ ID NO: 12342
  ref <308>: DATABASE ACCESSION NUMBER: EMBL / AF063302
  ref <309>: DATABASE ENTRY DATE: 1998-11-11

SEQ ID NO: 12347 - protein, 199 aa, Rattus norvegicus; identical to SEQ ID NO: 12343
  ref <308>: DATABASE ACCESSION NUMBER: SWISS-Prot / AAC72745
  ref <309>: DATABASE ENTRY DATE: 2002-06-01

SEQ ID NO: 12348 - DNA, 2576 bp, Homo sapiens; identical to SEQ ID NO: 12344
  ref <308>: DATABASE ACCESSION NUMBER: EMBL / U62733
  ref <309>: DATABASE ENTRY DATE: 1999-07-01

SEQ ID NO: 12349 - protein, 772 aa, Homo sapiens; identical to SEQ ID NO: 12345
  ref <308>: DATABASE ACCESSION NUMBER: SWISS-Prot / AAC51122
  ref <309>: DATABASE ENTRY DATE: 2001-10-16

SEQ ID NO: 12350 - DNA, 2640 bp, Rattus norvegicus; identical to SEQ ID NO: 998
  ref <308>: DATABASE ACCESSION NUMBER: EMBL / AF064868
  ref <309>: DATABASE ENTRY DATE: 2002-03-12

SEQ ID NO: 12351 - protein, 611 aa, Rattus norvegicus; identical to SEQ ID NO: 999
  ref <308>: DATABASE ACCESSION NUMBER: SWISS-Prot / AAC63267
  ref <309>: DATABASE ENTRY DATE: 2001-12-01

SEQ ID NO: 12352 - DNA, 2732 bp, Homo sapiens
  ref <308>: DATABASE ACCESSION NUMBER: Refseq / NM_020836
  ref <309>: DATABASE ENTRY DATE: 2001-02-26
ggcacgaggctgctttgtctgctgtcccctctctgctggagaacttagcccagagctagtgaacgagcctctgccgcagacatggagaaactcagcgcgctgcaggagcagaagggcgagctgcgcaagcggctgtcctacaccacacacaagctcgagaagctcgagaccgagttcgactccacgcgccactacctggagatcgagctgcggcgcgcgcaggaggaactggagaaggtcacggagaagctgcgcaggattcagagcaactacatggcactgcagaggatcaaccaggagctggaggacaagctgtaccgcatgggccagcactatgaggaggagaagcgtgcgctgagccacgagattgttgccctcaacagccatctgctagaagccaaggtgaccatcgacaagctgtcagaggacaacgagctctataggaaggactgcaatctagcggcccagctgctgcagtgcagccagacctacggcagggtccacaaggtgtctgagctgccctcggatttccaggagcgcgtgagcctgcacatggagaagcacggctgcagcctgccatccccgctctgccacccggcctacgccgacagcgtccccacctgcgtcattgccaaggtgctggagaagccggaccccgccagcctgtcctcccgcctgtccgatgcctccgcccgcgacctggccttctgcgacggggtggagaaaccaggcccgcggcccccctacaagggagacatctactgcagtgacacagccctctactgcccggaggagcggcggcgagaccggcggcctagcgtggacgcgcccgtgaccgacgtgggcttcctgcgggcccagaactccactgacagcgcggccgaggaggaggaggaggccgaggcggcggccttcccggcgggcttccagcatgaggccttccccagctacgcaggctcactgcccacgtccagctcctactccagcttcagcgccacgtcggaggagaaggagcacgcgcaggccagcacgctgaccgcgtcgcagcaggccatctacctgaacagccgcgacgagctcttcgaccgcaagccacccgccaccacctacgagggcagccctcgctttgccaaggccacggccgcggtggcggccccgctggaggccgaagtggccccaggcttcgggcggaccatgtcaccgtacccggccgagaccttccgcttcccggcctctccgggtccccagcaggccctgatgcccccaaacctgtggagcctgcgggccaagccggggaccgcccggctccccggggaggacatgaggggccagtggcgtcccctgagcgtggaggacatcggcgcctactcctaccccgtgagcgctgccggccgcgcctcaccctgcagcttctctgaacgctactacggcggggccgggggcagcccgggcaagaaggccgacggccgcgccagcccgctctacgccagctacaaggccgacagcttctccgagggggacgacctctcccagggccacctggcagagccctgcttcctgcgggcgggcggcgacctgagcctcagtcccggccgctcggctgacccactgcccggctatgcacccagcgaggggggggacggggacaggctcggggtgcagctgtgtgggaccgccagcagccctgagcccgagcagggttccagggactccttggagccgagctccatggaggcctccccggaaatgcatcctgccgcccgcctcagcccccagcaggcctttccgcggactggtggctcggggctgagccgcaaggacagcctcaccaaggcccagctctacggaaccttgctcaactgagcgcctgcgtgcaggcctggccgtggttcgctccccgccagcccacgtgccccagaagggccggcctcacctctccccagcccccgctgttcccctgccccggccaacaacgaggagtctgttcctccccgcacctcctctcctccccagccctgtaggcctgaggggagggtcccccacaccacggtgtccacccggccccgccccgtggaactccacttagagcgtttttcacgcgtccttcccccatgtgagaggagcatccccccttttataaagcgaaactatttttatagagaaaaagggtctttcttaacgcacttggcctccagctccctggacggctgccttggcgttttcaacacaaagctcctttattttttgggcgagggtgcgtggggcctgccccttggaagggaagggaaggacggtgtcctgtggagaccagactctgcaagtggggagaccacccccgcaagccagtgacaagggagccctgaagttgtgtccacgaagagggagctgaaacaaattcggggctatgaagtgttttaaaaatccattcttcgcagtgtggccaccacaccgccctgagccctcccacggcccatcgtcccgggtgggccgggatgatgccccagtgcggccggtgctcatctccgcccccgggtccgccccctgacaccgtcttactctacctcagacatgaggaggccctccattcctggtttctgtagcttgcattcttgttgtctctgatgcatgccctgccagttagtactgtattttgcattcattaataaaagacaccggtggaaaaaaaaaaaaaaaaaaaaaaaaaaaaaaaaaaaaaaaaaaaaaaaaaaaaa

SEQ ID NO: 12353 - protein, 593 aa, Homo sapiens; identical to SEQ ID NO: 1001
  ref <308>: DATABASE ACCESSION NUMBER: Refseq / NP_065887
  ref <309>: DATABASE ENTRY DATE: 2001-02-26

SEQ ID NO: 12354 - DNA, 803 bp, Rattus norvegicus
  ref <308>: DATABASE ACCESSION NUMBER: EMBL / AF065161
  ref <309>: DATABASE ENTRY DATE: 1998-05-29
gtcctctgcgtacagggatcttgtcctttgctggttgtggagcaaattgggcagcggcctctgtgggcccagtccctggagctgcccgggccagccatgcagcccttacccactggggcattcccagaggaggtgacagaggagacccctgtccagtctgagaatgaaccgaaggtgctagaccctgagggagatctgctgtgcatagccaaaacattctcctacctccgggaatctggttggtactggggttccattacagccagtgaggcccggcagcatctacagaagatgccggagggcacattcctcgtgcgagacagcacccaccccagctacctgtttacattgtcagtcaaaaccacccgtggccccaccaatgtacgcatcgagtatgccgactctagcttccgactggactccaattgcttgtcgagacctcgaatcctggccttcccagatgtggtcagccttgtgcagcattacgtggcctcctgtacggctgacacccggagtgacagcccagatcctgctcccaccccagccctgcctgtgtcgaagccagatgcacctggtgacccagtactgcctatccccgtggctactgctgtgcacctgaaattggtgcagccctttgtgcgcaggagcagcgcccgcagcttacaacacctgtgtcggctagtcatcaaccgactggtgaccgatgtggactgcctacccctgccccggcgcatggccgactacctccgacagtacccgttccagctctgactgggccaggcaccctgctctgcctcacacag

SEQ ID NO: 12355 - protein, 256 aa, Rattus norvegicus
  ref <308>: DATABASE ACCESSION NUMBER: SWISS-Prot / AAC17502
  ref <309>: DATABASE ENTRY DATE: 2002-06-15
VLCVQGSCPLLVVEQIGQRPLWAQSLELPGPAMQPLPTGAFPEEVTEETPVQSENEPKVLDPEGDLLCIAKTFSYLRESGWYWGSITASEARQHLQKMPEGTFLVRDSTHPSYLFTLSVKTTRGPTNVRIEYADSSFRLDSNCLSRPRILAFPDVVSLVQHYVASCTADTRSDSPDPAPTPALPVSKPDAPGDPVLPIPVATAVHLKLVQPFVRRSSARSLQHLCRLVINRLVTDVDCLPLPRRMADYLRQYPFQL

SEQ ID NO: 12356 - DNA, 1080 bp, Rattus norvegicus
  ref <308>: DATABASE ACCESSION NUMBER: EMBL / AF076856
  ref <309>: DATABASE ENTRY DATE: 1998-11-02
aattccgggtcgatggtgggcagacatctgctggagtccccagggctggcccgagagccaccatgaactcccaggggcctctacgtgggggccgaatgcccagcaccaaatctttcaacatgatgtccccaacgggtgacaactcggagttgctggctgaaataaaagcaggcaagagtctgaaaccaacaccgcagagcaaggggctgacaacagtgttctcaggcagcgggcagccagcctcccaggtaggcactggacgggtgccccgcccgggctcccagtgcctgcccagtgctcagccctaccgcttctcccggcagcctgagtcaccacagcctgcggtgtcacctgggccatctcgggcccggagccccaccccaccagcctctgggcctcagccactgctcaatggcagcatagtaccggcaccacctgccaccctagcaccaggagtgcatctggatgtggaggccctcatccccacacttgatgagcagggccggcccatcccggagtggaagcgccaggtgatggtccggaagctgcagcagaaaatgcaggaggaagaggagcagcggaggaaggaagaagaggaggaggcccggctggccagcctgcccgcctggagacgagacattcttaggaagaagctggaggaggagagggagcagaagcgaaaagaggaggagcggcagaagctggaggaaatccagagggcgaaagaacagtcggagaagctgcggacactaggatacgacgaggccaagctcgcgccctggcagcgacaggtcatcttgaagaagggggagatccctaagtaataggagtctcggcctcttgcgtgtagcctcacgagctctgagaaatggggagcggcccccagcccccgccccatcctgtcaggttggtgcggaagggtgggagccttgagcccttcccttcggtgcctgccggaatcttccctattcccctccctggccccacatccccaaccctgctgctggagtgctctcgcgaacccctgctgtcgcctggaaaaaaaaagtgcccaggctgctgacgcaaaaaaaaaaaaaa

SEQ ID NO: 12357 - protein, 253 aa, Rattus norvegicus
  ref <308>: DATABASE ACCESSION NUMBER: SWISS-Prot / AAC69563
  ref <309>: DATABASE ENTRY DATE: 2001-06-01
MNSQGPLRGGRMPSTKSFNMMSPTGDNSELLAEIKAGKSLKPTPQSKGLTTVFSGSGQPASQVGTGRVPRPGSQCLPSAQPYRFSRQPESPQPAVSPGPSRARSPTPPASGPQPLLNGSIVPAPPATLAPGVHLDVEALIPTLDEQGRPIPEWKRQVMVRKLQQKMQEEEEQRRKEEEEEARLASLPAWRRDILRKKLEEEREQKRKEEERQKLEEIQRAKEQSEKLRTLGYDEAKLAPWQRQVILKKGEIPK

SEQ ID NO: 12358 - DNA, 3542 bp, Homo sapiens
  ref <308>: DATABASE ACCESSION NUMBER: Refseq / NM_031475
  ref <309>: DATABASE ENTRY DATE: 2002-11-05
agcggagcgccaggcagcgcggagcggaggtcgggcccacagccgctccgcctcccggcccgcagatccccgacggccgcaccgcgggctcctctggcccgcaagaacacgtgcatggcgtcctggggaaggcgctgagtgcggagtcgcggcgccgcacgcggcaccatggccctggagcaggcgctgcaggcggcgcggcagggcgagctggacgtgctgaggtcgctgcacgccgcaggcctcctggggccctcgctgcgcgacccgctggacgcgctgcccgtgcaccacgcggcccgcgctgggaagctgcactgtctgcgcttcctggtggaggaagccgccctccccgccgcggcccgcgcccgcaacggcgccacaccggcccacgacgcctccgccaccggccacctcgcctgcctgcagtggctgctgtcgcagggcggctgcagagtgcaggacaaagacaattctggtgccacagtcttgcatctggctgcccgcttcggccaccccgaggtggtgaactggctcttgcatcatggcggtggggaccccaccgcggccacagacatgggcgccctgcctatccactacgctgccgccaaaggagacttcccctccctgaggcttctcgtcgagcactaccctgagggagtgaatgcccaaaccaagaacggtgccacgcccctgtacctggcgtgccaggagggccacctggaggtgacccagtacctggtgcaggaatgcggcgcagacccgcacgcgcgcgcccacgacggcatgaccccgctgcacgccgcggcgcagatgggccacagcccagtcatcgtgtggttggtgagctgcaccgacgtgagcctgtccgagcaggacaaagacggcgccaccgccatgcacttcgcggcgagccgcggccacaccaaggtgctcagctggctgctgctgcacggcggggagatctcggctgacctgtggggcgggaccccgctgcacgacgccgccgagaacggggagctagagtgctgccagatcctggtagtgaacggcgcggagctggacgtccgcgaccgggacgggtacacggccgccgacctgtcggacttcaacggccacagccactgcacccgctacctgcgcacggtggagaacctgagcgtggagcaccgcgtgctttcccgggatccatccgcagagctggaggctaagcagccggattcaggcatgtcctcacccaataccacggtgtcggtccagccgctgaactttgacctcagctcgcctaccagcaccctctccaactacgactcctgctcctccagccactccagcatcaagggccagcaccctccatgtgggctttccagcgctagagctgcagacatacagagctacatggacatgctgaacccggagctgggcctgcctcggggcacgattgggaagcccacacccccaccacccccacccagcttccccccgccacccccgcccccaggcacccaactgcccccacccccacctggctacccagctcccaagcctcctgtaggaccacaggcagctgacatctacatgcagaccaagaacaaactccgccacgtggagacagaggccctcaagaaggagctgagctcctgtgacggccacgacgggctgcggaggcaggactccagccgcaagccccgcgccttcagcaagcagcccagcacgggggactactaccggcagctgggccgctgccccggcgagacgctggccgcacgcccgggcatggcgcacagcgaggaggtgcgtgcccgccagcccgcgcgcgccggctgcccgcgcctcggccctgccgcccgcggctcactcgaaggcccctccgctcccccgcaggcggcgctgcttcctgggaaccatgttcctaacggctgcgccgcggaccccaaggcgtccagggagctgccactgccgcccccaccgccgccgccgcccctgccggaggccgcgagttcgccaccgccggccccgcctctgcccctcgagagcgctggccctggctgcgggcagcgccgctcctcctcgtccaccggcagcaccaagtctttcaacatgatgtccccgacgggcgacaactcggagctactggctgagattaaggcaggcaagagcctgaagccgacgccccagagcaaggggctgaccacagtgttctcaggcatcgggcagccggccttccagcccgattcgccgctgccttctgtgtcacctgcactgtcaccagtccggagccccacaccgccagctgcggggtttcagccgctgctcaatggaagcttggttcccgtgccgcccactactcctgcgccgggagtgcagctggacgtggaggctctcatccccacgcacgatgagcagggccggcccatccccgagtggaagcgccaggtgatggtgcgcaagatgcagctgaagatgcaggaggaggaggagcagaggcggaaggaggaggaggaggaggcccggctggccagcatgcccgcctggaggcgggacctcctgcggaagaagctggaagaagagagggagcagaagcggaaagaggaggagcgacagaagcaggaggagctgcggcgggagaaggaacagtcagagaagctgcggacgctgggctacgatgagagcaagctggcgccctggcagcgacaggtcatcctgaagaagggggacatcgctaagtactagaggccgcagactcctgtccgcagcctcgcagctccgtggggccctccgccccagccccagccagccaggccctggtggaaaggctgggagccgcacagccctcccctcctgcgctggaaaccctccctgacccccaccctggccccccgtatccccagcccttggcaacactggagtgcacacgccgccacggttgcccagaaaaagtgcccaagctgctgacgcaaacaacaacaaatgctgcttatttgcatgccgacttacatatatttgcatgttcgttgactatcaaagagtgcagagctctccccagccccgtgggtggtgactttgttttcctgcggggctcagccccctccaggatgcagccccctcccccgcaccccggaaccggcgtcgctggcgcatcctgggtggaggcaggccccgagctcggggaaggggttttcccttcctctctgccccagatctgcgcgcggcctagcccgggcctcatttcttatccccgccaagggtttcctctcagtcatttgtttaccagaaacatgaaaactgcctgtctggccgggccgcacttgtggcccccgggaccccacctctggccccacctccctcaagtctgcgccccgtccccagccagacccactcgctgccgggaccctttcactgccccggtggagtgaatagaggatgaggggccctgaccctgtgtctccaactgctgcaccccatcccgaccctgtctccgccacctcgcagccccattaaagcgctctcatctggaaaaaaaaaaaaaaaaaaaaaaaaaa

SEQ ID NO: 12359 - protein, 854 aa, Homo sapiens
  ref <308>: DATABASE ACCESSION NUMBER: Refseq / NP_113663
  ref <309>: DATABASE ENTRY DATE: 2002-11-05
MALEQALQAARQGELDVLRSLHAAGLLGPSLRDPLDALPVHHAARAGKLHCLRFLVEEAALPAAARARNGATPAHDASATGHLACLQWLLSQGGCRVQDKDNSGATVLHLAARFGHPEVVNWLLHHGGGDPTAATDMGALPIHYAAAKGDFPSLRLLVEHYPEGVNAQTKNGATPLYLACQEGHLEVTQYLVQECGADPHARAHDGMTPLHAAAQMGHSPVIVWLVSCTDVSLSEQDKDGATAMHFAASRGHTKVLSWLLLHGGEISADLWGGTPLHDAAENGELECCQILVVNGAELDVRDRDGYTAADLSDFNGHSHCTRYLRTVENLSVEHRVLSRDPSAELEAKQPDSGMSSPNTTVSVQPLNFDLSSPTSTLSNYDSCSSSHSSIKGQHPPCGLSSARAADIQSYMDMLNPELGLPRGTIGKPTPPPPPPSFPPPPPPPGTQLPPPPPGYPAPKPPVGPQAADIYMQTKNKLRHVETEALKKELSSCDGHDGLRRQDSSRKPRAFSKQPSTGDYYRQLGRCPGETLAARPGMAHSEEVRARQPARAGCPRLGPAARGSLEGPSAPPQAALLPGNHVPNGCAADPKASRELPLPPPPPPPPLPEAASSPPPAPPLPLESAGPGCGQRRSSSSTGSTKSFNMMSPTGDNSELLAEIKAGKSLKPTPQSKGLTTVFSGIGQPAFQPDSPLPSVSPALSPVRSPTPPAAGFQPLLNGSLVPVPPTTPAPGVQLDVEALIPTHDEQGRPIPEWKRQVMVRKMQLKMQEEEEQRRKEEEEEARLASMPAWRRDLLRKKLEEEREQKRKEEERQKQEELRREKEQSEKLRTLGYDESKLAPWQRQVILKKGDIAKY

SEQ ID NO: 12360 - DNA, 2066 bp, Rattus norvegicus
  ref <308>: DATABASE ACCESSION NUMBER: EMBL / AF079162
  ref <309>: DATABASE ENTRY DATE: 1999-01-04
gaaagatggatgtgggcaaacggcaaccgcaaagacttcaggactcaacgagcaatgttggcaaatggaaggctcagggtgtgagtccccggcagcgggccacgacagcagcacccgcagcgcccaccgtgtgagcgggcagcagcgggtatgtcacccggagccggagtccccggccgccagcagcgtcctcgcgagccgagcgcccaggcgcgcccggagcccgcggcggcggcggcaacatggcctcggctggtaacgccgccggggccctgggcaggcaggccggcggcgggaggcgcagacggaccgggggaccgcaccgcgccgcgccggaccgggactatctgcaccggcccagctactgcgacgccgccttcgctatggagcagatttccaaggggaaggctactggccggaaagcgccgctgtggctgagagcgaagtttcagagactcttatttaaactgggttgttacattcaaaaagactgcggcaagtttttggttgtgggtctcctcatatttggggccttcgctgtgggattaaaggcagctaatctcgagaccaacgtggaggagctgtgggtggaagttggtggacgagtgagtcgagaattaaattatacccgccagaagataggagaagaggctatgtttaatcctcaactcatgattcagactccaaaagaagaaggcgctaatgtcctgaccacagaggccctactacaacacctggactcagcactccaggccagccgtgtgcacgtctacatgtataacaggcaatggaagttggaacatttatgctacaaatcaggggaacttatcacagagacagggtacatggatcagataatagaatacctttacccttgcttaatcattacacctttggactgcttctgggaaggggcaaagctacagtccgggacagcgtacctcctaggtaagcctcctttacggtggacaaactttgaccccttggaattcctagaagagttaaagaaaataaactaccaagtggacagttgggaggaaatgctgaataaagccgaagttggccatgggtacatggaccggccttgcctcaatccagccgacccagattgccctgccacagcccccaacaaaaattcaaccaaacctcttgatgtggcccttgttttgaacggtggatgtcaaggtttatccaggaagtatatgcattggcaggaggagttgattgtgggtggcaccgtcaagaacgccactggaaagcttgtcagcgctcatgccctgcaaaccatgttccagttaatgactcccaagcaaatgtatgaacacttcaggggctacgactatgtctctcacatcaactggaatgaggatagggcagccgccatcctggaggcatggcagaggacttacgtggaggtggttcatcaaagtgttgccccaaactccactcaaaaggtgctttccttcaccaccaggaccctggacgacatcctaaaatccttctctgatgtcagtgtcatccgagtggccagtggttacctactgatgcttgcctatgcctgtttaaccatgctgcgctgggactgctccaagtcccagggtgccgtggggttggctggtgtcctgttggttgcactgtcagtggctgcaggattgggcctctgctccttgattggcatttcctttaatgctgcaacaactcaggttttgccatttcttgcccttggtgttggtgtggacgacgtctttctcctggcccatgcattcagtgaaacgggacagaataagaggattccaattgaggacaggactggggagtgcctcaagcgcacgggagccagcgtggccctcacctccatcagcaatgtcactgccttcttcatggctgcattaatccctattcctgcactgcgagcgttctccctccaggctgctgtggtggtggtattcaattttgccatggttctactcattttccctgcaattctcagcatggatttatacagacgtgaggacagaagattggatattttctgctgtttcacaagcccctgtgtcagcctcgtg

SEQ ID NO: 12361 - protein, 608 aa, Rattus norvegicus
  ref <308>: DATABASE ACCESSION NUMBER: SWISS-Prot / AAC99398
  ref <309>: DATABASE ENTRY DATE: 2002-10-01
MASAGNAAGALGRQAGGGRRRRTGGPHRAAPDRDYLHRPSYCDAAFAMEQISKGKATGRKAPLWLRAKFQRLLFKLGCYIQKDCGKFLVVGLLIFGAFAVGLKAANLETNVEELWVEVGGRVSRELNYTRQKIGEEAMFNPQLMIQTPKEEGANVLTTEALLQHLDSALQASRVHVYMYNRQWKLEHLCYKSGELITETGYMDQIIEYLYPCLIITPLDCFWEGAKLQSGTAYLLGKPPLRWTNFDPLEFLEELKKINYQVDSWEEMLNKAEVGHGYMDRPCLNPADPDCPATAPNKNSTKPLDVALVLNGGCQGLSRKYMHWQEELIVGGTVKNATGKLVSAHALQTMFQLMTPKQMYEHFRGYDYVSHINWNEDRAAAILEAWQRTYVEVVHQSVAPNSTQKVLSFTTRTLDDILKSFSDVSVIRVASGYLLMLAYACLTMLRWDCSKSQGAVGLAGVLLVALSVAAGLGLCSLIGISFNAATTQVLPFLALGVGVDDVFLLAHAFSETGQNKRIPIEDRTGECLKRTGASVALTSISNVTAFFMAALIPIPALRAFSLQAAVVVVFNFAMVLLIFPAILSMDLYRREDRRLDIFCCFTSPCVSLV

SEQ ID NO: 12362 - DNA, 4344 bp, Homo sapiens
  ref <308>: DATABASE ACCESSION NUMBER: Refseq / NM_000264
  ref <309>: DATABASE ENTRY DATE: 2002-11-19
atggcctcggctggtaacgccgccgagccccaggaccgcggcggcggcggcagcggctgtatcggtgccccgggacggccggctggaggcgggaggcgcagacggacgggggggctgcgccgtgctgccgcgccggaccgggactatctgcaccggcccagctactgcgacgccgccttcgctctggagcagatttccaaggggaaggctactggccggaaagcgccactgtggctgagagcgaagtttcagagactcttatttaaactgggttgttacattcaaaaaaactgcggcaagttcttggttgtgggcctcctcatatttggggccttcgcggtgggattaaaagcagcgaacctcgagaccaacgtggaggagctgtgggtggaagttggaggacgagtaagtcgtgaattaaattatactcgccagaagattggagaagaggctatgtttaatcctcaactcatgatacagacccctaaagaagaaggtgctaatgtcctgaccacagaagcgctcctacaacacctggactcggcactccaggccagccgtgtccatgtatacatgtacaacaggcagtggaaattggaacatttgtgttacaaatcaggagagcttatcacagaaacaggttacatggatcagataatagaatatctttacccttgtttgattattacacctttggactgcttctgggaaggggcgaaattacagtctgggacagcatacctcctaggtaaacctcctttgcggtggacaaacttcgaccctttggaattcctggaagagttaaagaaaataaactatcaagtggacagctgggaggaaatgctgaataaggctgaggttggtcatggttacatggaccgcccctgcctcaatccggccgatccagactgccccgccacagcccccaacaaaaattcaaccaaacctcttgatatggcccttgttttgaatggtggatgtcatggcttatccagaaagtatatgcactggcaggaggagttgattgtgggtggcacagtcaagaacagcactggaaaactcgtcagcgcccatgccctgcagaccatgttccagttaatgactcccaagcaaatgtacgagcacttcaaggggtacgagtatgtctcacacatcaactggaacgaggacaaagcggcagccatcctggaggcctggcagaggacatatgtggaggtggttcatcagagtgtcgcacagaactccactcaaaaggtgctttccttcaccaccacgaccctggacgacatcctgaaatccttctctgacgtcagtgtcatccgcgtggccagcggctacttactcatgctcgcctatgcctgtctaaccatgctgcgctgggactgctccaagtcccagggtgccgtggggctggctggcgtcctgctggttgcactgtcagtggctgcaggactgggcctgtgctcattgatcggaatttcctttaacgctgcaacaactcaggttttgccatttctcgctcttggtgttggtgtggatgatgtttttcttctggcccacgccttcagtgaaacaggacagaataaaagaatcccttttgaggacaggaccggggagtgcctgaagcgcacaggagccagcgtggccctcacgtccatcagcaatgtcacagccttcttcatggccgcgttaatcccaattcccgctctgcgggcgttctccctccaggcagcggtagtagtggtgttcaattttgccatggttctgctcatttttcctgcaattctcagcatggatttatatcgacgcgaggacaggagactggatattttctgctgttttacaagcccctgcgtcagcagagtgattcaggttgaacctcaggcctacaccgacacacacgacaatacccgctacagccccccacctccctacagcagccacagctttgcccatgaaacgcagattaccatgcagtccactgtccagctccgcacggagtacgacccccacacgcacgtgtactacaccaccgctgagccgcgctccgagatctctgtgcagcccgtcaccgtgacacaggacaccctcagctgccagagcccagagagcaccagctccacaagggacctgctctcccagttctccgactccagcctccactgcctcgagcccccctgtacgaagtggacactctcatcttttgctgagaagcactatgctcctttcctcttgaaaccaaaagccaaggtagtggtgatcttcctttttctgggcttgctgggggtcagcctttatggcaccacccgagtgagagacgggctggaccttacggacattgtacctcgggaaaccagagaatatgactttattgctgcacaattcaaatacttttctttctacaacatgtatatagtcacccagaaagcagactacccgaatatccagcacttactttacgacctacacaggagtttcagtaacgtgaagtatgtcatgttggaagaaaacaaacagcttcccaaaatgtggctgcactacttcagagactggcttcagggacttcaggatgcatttgacagtgactgggaaaccgggaaaatcatgccaaacaattacaagaatggatcagacgatggagtccttgcctacaaactcctggtgcaaaccggcagccgcgataagcccatcgacatcagccagttgactaaacagcgtctggtggatgcagatggcatcattaatcccagcgctttctacatctacctgacggcttgggtcagcaacgaccccgtcgcgtatgctgcctcccaggccaacatccggccacaccgaccagaatgggtccacgacaaagccgactacatgcctgaaacaaggctgagaatcccggcagcagagcccatcgagtatgcccagttccctttctacctcaacgggttgcgggacacctcagactttgtggaggcaattgaaaaagtaaggaccatctgcagcaactatacgagcctggggctgtccagttaccccaacggctaccccttcctcttctgggagcagtacatcggcctccgccactggctgctgctgttcatcagcgtggtgttggcctgcacattcctcgtgtgcgctgtcttccttctgaacccctggacggccgggatcattgtgatggtcctggcgctgatgacggtcgagctgttcggcatgatgggcctcatcggaatcaagctcagtgccgtgcccgtggtcatcctgatcgcttctgttggcataggagtggagttcaccgttcacgttgctttggcctttctgacggccatcggcgacaagaaccgcagggctgtgcttgccctggagcacatgtttgcacccgtcctggatggcgccgtgtccactctgctgggagtgctgatgctggcgggatctgagttcgacttcattgtcaggtatttctttgctgtgctggcgatcctcaccatcctcggcgttctcaatgggctggttttgcttcccgtgcttttgtctttctttggaccatatcctgaggtgtctccagccaacggcttgaaccgcctgcccacaccctcccctgagccaccccccagcgtggtccgcttcgccatgccgcccggccacacgcacagcgggtctgattcctccgactcggagtatagttcccagacgacagtgtcaggcctcagcgaggagcttcggcactacgaggcccagcagggcgcgggaggccctgcccaccaagtgatcgtggaagccacagaaaaccccgtcttcgcccactccactgtggtccatcccgaatccaggcatcacccaccctcgaacccgagacagcagccccacctggactcagggtccctgcctcccggacggcaaggccagcagccccgcagggacccccccagagaaggcttgtggccacccctctacagaccgcgcagagacgcttttgaaatttctactgaagggcattctggccctagcaatagggcccgctggggccctcgcggggcccgttctcacaaccctcggaacccagcgtccactgccatgggcagctccgtgcccggctactgccagcccatcaccactgtgacggcttctgcctccgtgactgtcgccgtgcacccgccgcctgtccctgggcctgggcggaacccccgagggggactctgcccaggctaccctgagactgaccacggcctgtttgaggacccccacgtgcctttccacgtccggtgtgagaggagggattcgaaggtggaagtcattgagctgcaggacgtggaatgcgaggagaggccccggggaagcagctccaactga

SEQ ID NO: 12363 - protein, 1447 aa, Homo sapiens
  ref <308>: DATABASE ACCESSION NUMBER: Refseq / NP_000255
  ref <309>: DATABASE ENTRY DATE: 2002-11-19
MASAGNAAEPQDRGGGGSGCIGAPGRPAGGGRRRRTGGLRRAAAPDRDYLHRPSYCDAAFALEQISKGKATGRKAPLWLRAKFQRLLFKLGCYIQKNCGKFLVVGLLIFGAFAVGLKAANLETNVEELWVEVGGRVSRELNYTRQKIGEEAMFNPQLMIQTPKEEGANVLTTEALLQHLDSALQASRVHVYMYNRQWKLEHLCYKSGELITETGYMDQIIEYLYPCLIITPLDCFWEGAKLQSGTAYLLGKPPLRWTNFDPLEFLEELKKINYQVDSWEEMLNKAEVGHGYMDRPCLNPADPDCPATAPNKNSTKPLDMALVLNGGCHGLSRKYMHWQEELIVGGTVKNSTGKLVSAHALQTMFQLMTPKQMYEHFKGYEYVSHINWNEDKAAAILEAWQRTYVEVVHQSVAQNSTQKVLSFTTTTLDDILKSFSDVSVIRVASGYLLMLAYACLTMLRWDCSKSQGAVGLAGVLLVALSVAAGLGLCSLIGISFNAATTQVLPFLALGVGVDDVFLLAHAFSETGQNKRIPFEDRTGECLKRTGASVALTSISNVTAFFMAALIPIPALRAFSLQAAVVVVFNFAMVLLIFPAILSMDLYRREDRRLDIFCCFTSPCVSRVIQVEPQAYTDTHDNTRYSPPPPYSSHSFAHETQITMQSTVQLRTEYDPHTHVYYTTAEPRSEISVQPVTVTQDTLSCQSPESTSSTRDLLSQFSDSSLHCLEPPCTKWTLSSFAEKHYAPFLLKPKAKVVVIFLFLGLLGVSLYGTTRVRDGLDLTDIVPRETREYDFIAAQFKYFSFYNMYIVTQKADYPNIQHLLYDLHRSFSNVKYVMLEENKQLPKMWLHYFRDWLQGLQDAFDSDWETGKIMPNNYKNGSDDGVLAYKLLVQTGSRDKPIDISQLTKQRLVDADGIINPSAFYIYLTAWVSNDPVAYAASQANIRPHRPEWVHDKADYMPETRLRIPAAEPIEYAQFPFYLNGLRDTSDFVEAIEKVRTICSNYTSLGLSSYPNGYPFLFWEQYIGLRHWLLLFISVVLACTFLVCAVFLLNPWTAGIIVMVLALMTVELFGMMGLIGIKLSAVPVVILIASVGIGVEFTVHVALAFLTAIGDKNRRAVLALEHMFAPVLDGAVSTLLGVLMLAGSEFDFIVRYFFAVLAILTILGVLNGLVLLPVLLSFFGPYPEVSPANGLNRLPTPSPEPPPSVVRFAMPPGHTHSGSDSSDSEYSSQTTVSGLSEELRHYEAQQGAGGPAHQVIVEATENPVFAHSTVVHPESRHHPPSNPRQQPHLDSGSLPPGRQGQQPRRDPPREGLWPPLYRPRRDAFEISTEGHSGPSNRARWGPRGARSHNPRNPASTAMGSSVPGYCQPITTVTASASVTVAVHPPPVPGPGRNPRGGLCPGYPETDHGLFEDPHVPFHVRCERRDSKVEVIELQDVECEERPRGSSSN

SEQ ID NO: 12364 - DNA, 4915 bp, Rattus norvegicus
  ref <308>: DATABASE ACCESSION NUMBER: EMBL / AF081148
  ref <309>: DATABASE ENTRY DATE: 1998-10-06
gaattccatccatgcaaatcagaaactgtggttgtggttgtcagtgtgtggttcccggagaggactcagcctgaggaggtcactggttcacagccgctcctcccattccatctctcccctcattgcagaactgctgcatgtgtacagtggcagaaaggactcaattgacttcaactgctgcctgcttttgcttacaactttttcttataaaggaactcacctccctctgtgtcttcaaggtggcaggctacctcctctaaactccggagctcactccgaagactatggagcctacatagtttctaaagataaacgatgaatttcaaaggtatttatggttcgacgatgaatttcatctttcccagaatgatatgaggatcaatgatgcagactgctgggctcgatgaagctgggcatttataactagattcattaaggaatacaaggaaaatatttaaagggatcaataatggtgtcttctggttgcagaatgcgaagtctctggtttatcatgataatcagtttctcaccgaataccgaaggtttcagcagagcagccttgccattcgggttagttagacgagagctgtcctgtgaaggttattctatagacctgcgatgtccgggcagtgacgtcatcatgatcgagagcgcaaactacggtcggacggacgacaagatctgcgacgcagacccctttcagatggagaacacagactgctacctccctgatgccttcaaaatcatgactcaaaggtgcaacaaccgaacacagtgtgtagtagttaccgggtcagatgtatttcctgatccatgtcccggaacttacaaataccttgaagttcaatatgaatgtgtcccttacatggagcaaaaagtttttgtgtgtcctggaaccttgaaagcaattgtggactctccaagtatctatgaagctgagcaaaaggcaggtgcttggtgcaaggacccccttcaggctgcagataaaatttattttatgccctggactccctaccgcaccgataccttaatagaatatgcttctttagaagattttcaaaacagccgccagacaacaacatacaaacttccaaaccgagtggacggtactggatttgtggtgtatgacggggcagtcttcttcaacaaagaaagaacgagaaacattgttaaatttgacttgaggactagaatcaagagtggggaggccataatcaactacgccaactaccatgacacctcaccctacagatggggggggaagactgacattgacctggcagtggatgaaaatggcttgtgggtcatctacgccaccgagcagaacaacggaatgatcgtgattagccagctcaatccgtacactctccgattcgaagcaacctgggagacgacgtatgacaagcgtgcggcgtccaatgctttcatgatatgcggggtcctctacgtggtcaggtcagtgtaccaagacaatgaaagcgaagctggcaagaacgtcatcgactacatttacaacacaaggttgagccggggagagcacgtggacgttcccttccccaaccagtaccagtacatcgctgcagtggattacaacccaagagacaaccaactctacgtatggaacaataactttatcttacggtattctctggagtttggtccacccgaccctgcccaagtgcctaccacagctgtgacaataacttcttcagctgagctgttcaaaaccacagtgtcaaccacaagcagtacttcacagagaggccccgtgagcagcacagtcgctggtcctcaggaaggaagccgagggacaaagccacctccagcagtctctacaaccaaaattcctcctgtaacaaatatttttcccctgccagagagattctgcgaagcgttagaaatgaaggggataaagtggcctcagacacaaagggggatgatggttgagcgaccgtgtcccaagggaacaagaggaacggcctcgtatctctgcatggcttccacaggaacctggaacccgaagggcccggatcttagcaactgcacctctcactgggtgaatcagctggcccagaagatcagaagtggagagaatgctgcaagtctggccaacgaactggctaagcacaccaaggggacggtgttcgctggggatgtgagctcctctgtgagactgatggaacagttggtggacatcctggatgcccagctgcaggagctgaaaccgagcgagaaggactcggccgggaggagttataacaagctccaaaaacgagagaagacatgcagggcttaccttaaggccattgtggacacagtagataaccttctgagagccgagactttggactgctggaaacacatgaattcctcagagcaggcgcacacagccaccatgctgttggacaccttggaagaaggagcatttgtcctggcagacaaccttttggaaccaacccgggtctcaatgccaacggataatattgttctagaagtcgctgtcctcagcacggaaggacaggtccaagacttcaccttccatctcggcttcaagggggccttcagctccatccagctctcagccaacaccgtcaagcaaaacagcagaaacgggctggcaaaggtggtattcatcatttaccggagtctgggaccattcctgagcaccgaaaatgcgaccgtcaaactgggcgcagacctcctgggtcggaacagcaccatcgcagtgaactcgcacgtcctttcagtctccatcaataaggagtccagccgtgtgtacttgacagacccggtgcttttttcaatgccacacattgattctgacaattatttcaacgcaaactgctccttctggaactactcagagagaaccatgatgggatattggtctacccagggctgcaagctggttgacactaataaaactcgcacgacgtgtgcatgcagccacctaaccaattttgctattctcatggcccacagggaaattgtgtacaaagatggcgtccacaaattgctgctgacagtcatcacctgggtgggcatcgttgtctccctcgtctgcctggctatctgcatcttcaccttctgcttcttccgaggcctgcaaagcgaccgcaacacgatccacaagaacctgtgtatcaacctcttcatcgctgagtttattttcctaataggcattgataaaacacagtacacgattgcgtgccccgtgtttgcaggactcctgcactttttcttcctggctgctttttcctggatgtgcctagaaggtgtgcagctctacctcatgttggttgaagttttcgagagtgaatactcaaggaagaagtattactatgtcgccgggtacctcttccctgccacagtggtcggtgtttcagctgctatcgactacaagagttacgggacactagaggcttgctggcttcacgttgataactatttcatatggagtttcattgggcctgttactttcatcattctgctaaatattattttcctggtgatcacgctgtgcaaaatggtgaaacattcaaacactttgaaaccagattctagcaggttggaaaacattaagtcttgggtgctcggtgcgttcgccctgctgtgtctcctgggcctaacctggtcctttgggttgctttttgttaacgaggagaccgttgtcatggcttatctcttcaccgcctttaatgctttccagggactgtttattttcatcttccactgtgctcttcaaaagaaagtacggaaagagtatgccaagtgcttcagacactggtactgctgtggtggcctcccgaccgagagcccgcacagctctgtaaaggcgtccacctcccgcaccagtgctcgttactcctctggtacacagagccgtataagaaggatgtggaatgacaccgtgaggaagcagtctgaatcgtcttttatctcaggaatgactggcaattacctactaacaaaccctcttcttcgaccccacggcactaacaacccctataacacattgctcgctgaaacagttgtatgtaatgccccttcagcgcccgtgtttaactcaccaggacattcactgaacaatacccgggacaccagcgccatggatactctaccgctaaatggtaacttcaacaacagctactccctgcgcaaggccgactaccacgacggcgtgcaggttgtggactgtggactaagtctgaacgacaccgcgtttgagaaaatgatcatttcagagttagtgcacaacaacctccggggtagcaacaaaacccacaacttggagctcaagctcccagttaaacccgtgattggcggcagcagcagcgaagatgacgcgatcgtggccgacgcctcatctttgatgcacggtgataacccagggctggaattccgccacaaagagctggaggcaccgctcatccctcagcggactcactcgcttctgtaccaaccccagaaaaaagtgaaacccgaggcaaccgacagctacgtctcccagctgacggccgaggccgacgagcacctccagtcccccaacagagactctctgtacacgagcatgcccaacctaagagactctccctacccggagagcagcccggacatggcagaggacctgtctccctccaggaggagcgagaacgaggacatttactacaaaagtatgcccaatcttggggctggccgccagctccagatgtgctaccagatcagcagaggcaatagcgatggctacatcatccccattaacaaagaagggtgcatcccagagggggacgtcagggaaggacagatgcagctggtaacaagtctttaatagtacagctaaggaattcctagggccacatgcaagtattaactgctaaagactgtgccagccggccctgcagctctcccggaattc

SEQ ID NO: 12365 - protein, 1478 aa, Rattus norvegicus
  ref <308>: DATABASE ACCESSION NUMBER: SWISS-Prot / AAC62654
  ref <309>: DATABASE ENTRY DATE: 2003-02-01
MVSSGCRMRSLWFIMIISFSPNTEGFSRAALPFGLVRRELSCEGYSIDLRCPGSDVIMIESANYGRTDDKICDADPFQMENTDCYLPDAFKIMTQRCNNRTQCVVVTGSDVFPDPCPGTYKYLEVQYECVPYMEQKVFVCPGTLKAIVDSPSIYEAEQKAGAWCKDPLQAADKIYFMPWTPYRTDTLIEYASLEDFQNSRQTTTYKLPNRVDGTGFVVYDGAVFFNKERTRNIVKFDLRTRIKSGEAIINYANYHDTSPYRWGGKTDIDLAVDENGLWVIYATEQNNGMIVISQLNPYTLRFEATWETTYDKRAASNAFMICGVLYVVRSVYQDNESEAGKNVIDYIYNTRLSRGEHVDVPFPNQYQYIAAVDYNPRDNQLYVWNNNFILRYSLEFGPPDPAQVPTTAVTITSSAELFKTTVSTTSSTSQRGPVSSTVAGPQEGSRGTKPPPAVSTTKIPPVTNIFPLPERFCEALEMKGIKWPQTQRGMMVERPCPKGTRGTASYLCMASTGTWNPKGPDLSNCTSHWVNQLAQKIRSGENAASLANELAKHTKGTVFAGDVSSSVRLMEQLVDILDAQLQELKPSEKDSAGRSYNKLQKREKTCRAYLKAIVDTVDNLLRAETLDCWKHMNSSEQAHTATMLLDTLEEGAFVLADNLLEPTRVSMPTDNIVLEVAVLSTEGQVQDFTFHLGFKGAFSSIQLSANTVKQNSRNGLAKVVFIIYRSLGPFLSTENATVKLGADLLGRNSTIAVNSHVLSVSINKESSRVYLTDPVLFSMPHIDSDNYFNANCSFWNYSERTMMGYWSTQGCKLVDTNKTRTTCACSHLTNFAILMAHREIVYKDGVHKLLLTVITWVGIVVSLVCLAICIFTFCFFRGLQSDRNTIHKNLCINLFIAEFIFLIGIDKTQYTIACPVFAGLLHFFFLAAFSWMCLEGVQLYLMLVEVFESEYSRKKYYYVAGYLFPATVVGVSAAIDYKSYGTLEACWLHVDNYFIWSFIGPVTFIILLNIIFLVITLCKMVKHSNTLKPDSSRLENINNYRVCDGYYNTDLPGSWVLGAFALLCLLGLTWSFGLLFVNEETVVMAYLFTAFNAFQGLFIFIFHCALQKKVRKEYAKCFRHWYCCGGLPTESPHSSVKASTSRTSARYSSGTQSRIRRMWNDTVRKQSESSFISGDINSTSTLNQGMTGNYLLTNPLLRPHGTNNPYNTLLAETVVCNAPSAPVFNSPGHSLNNTRDTSAMDTLPLNGNFNNSYSLRKADYHDGVQVVDCGLSLNDTAFEKMIISELVHNNLRGSNKTHNLELKLPVKPVIGGSSSEDDAIVADASSLMHGDNPGLEFRHKELEAPLIPQRTHSLLYQPQKKVKPEATDSYVSQLTAEADEHLQSPNRDSLYTSMPNLRDSPYPESSPDMAEDLSPSRRSENEDIYYKSMPNLGAGRQLQMCYQISRGNSDGYIIPINKEGCIPEGDVREGQMQLVTSL

SEQ ID NO: 12366 - DNA, 31737 bp, Homo sapiens; identical to SEQ ID NO: 1150
  ref <308>: DATABASE ACCESSION NUMBER: EMBL / AL157903
  ref <309>: DATABASE ENTRY DATE: 2002-09-15

SEQ ID NO: 12367 - protein, 1318 aa, Homo sapiens; identical to SEQ ID NO: 1151

SEQ ID NO: 12368 - DNA, 2931 bp, Rattus norvegicus
  ref <308>: DATABASE ACCESSION NUMBER: EMBL / AF083341
  ref <309>: DATABASE ENTRY DATE: 1998-08-27
ggaggcagcggtcttagaatgagcagcaatatccacgcgaaccatctcagcctagacgcgtcctcttcttcctcctcctcttcttcctcctcctcttcctcctcgtcctcggtccacgagcccaagatggatgcgctcatcatcccggtgaccatggaggtgccgtgcgacagccggggccaacgcatgtggtgggctttcttggcctcctccatggtgactttcttcgggggcctcttcatcatcttgctctggcggactctcaagtacctgtggaccgtttgctgccactgcgggggcaagacgaaggaggcccagaagataaacaatggctccagccaggcagatggtactctcaagccagtggatgaaaaagaggaggtggtggcagccgaggtcgtctggatgacatctgtgaaggactgggcaggggtgatgatatctgcccagacactgactggcagagtcctggttgtgttagtctttgctctcagcattggtgcccttgtaatatacttcatagactcatcaaacccaatacaatcctgccagaatttctacaaagatttcacattacagatcgacatggctttcaacgtgttcttccttctctactttggcttgcggtttattgcagccaatgataagctgtggttctggctggaagtgaattctgtagtagatttcttcacagtccctcccgtgtttgtgtctgtatacttaaacagaagttggcttggcttgagatttttaagagctctcagactgattcagttttcagaaattttgcagtttctgaatatccttaaaacaagtaattccatcaagctggtgaacctgctctccatatttatcagcacgtggctgactgcagctggattcatccacttggtggagaattcaggggacccatgggaaaatttccaaaacaaccaggcacttacgtactgggaatgtgtctacttactcatggtcacaatgtctacagtgggttacggggatgtttatgcaaaaaccacgcttggacgcctcttcatggtcttcttcatcctcgggggactggccatgtttgccagctacgtccctgaaatcatagagttaataggaaaccgcaagaaatacgggggctcctatagcgcggttagtggaagaaagcacattgtagtctgtgggcacattactctggagagtgtctctaacttcctgaaggactttctgcacaaggaccgggatgatgtcaacgtggagattgtttttcttcacaacatctcccctaaccttgagcttgaggctctgttcaaacggcatttcactcaggtggagttttatcagggctctgtcctcaatccacacgatcttgccagagtcaagatagagtcagcagatgcatgtttgatccttgccaataagtactgcgctgacccggatgcagaagatgcctccaacatcatgagagtgatctccataaagaactaccacccaaagatcaggatcatcactcagatgctgcagtatcacaacaaggcccatctgctcaacatccccagctggaactggaaagagggtgatgactcaatatgccttgcagagctcaagttgggtttcatagcccagagctgtctggctcaaggcctctccacaatgcttgccaatctcttctctatgaggtcattcataaagattgaggaagatacatggcagaaatactacttggaaggagtctccaatgaaatgtacacagaatatctttccagtgccttcgtgggtctgtccttccctactgtttgtgagctgtgttttgtgaagcttaagctcctgatgatagccattgagtacaagtctgccaacagggagagccgaagccgaaagcgaatattaattaaccctgggaaccaccttaagatccaagaaggtactttaggatttttcatcgcaagtgatgccaaagaagttaaaagggcatttttttactgcaaggcctgtcatgatgacgtcacagatcccaaaagaattaaaaaatgcggctgcaggcggcttgaagatgagcaaccgccaacactgtcaccaaaaaaaaaacaacgtaatgggggcatgaggaactcacccaacacatccccgaagctgatgaggcatgaccccttgttaattcctggcaacgatcagattgacaacatggactccaatgtgaaaaagtacgactccactggaatgtttcactggtgcgcacccaaggagattgagaaagtcatcttgactcgaagtgaagctgccatgactgtcctgagtggtcatgttgtagtctgcatctttggggatgtcagctcagccctgattggcctccggaacctggtgatgccgcttcgtgctagcaattttcactatcatgagctcaaacacattgtgtttgtgggctccatcgagtacctcaagcgggagtgggaaacactgcacaacttccccaaagtatccatattgcctggtacgccattaagtcgggctgatttaagggctgtcaacctcaacctctgtgacatgtgcgttatcctgtcagccaatcagaataatattgatgatacttcagttcaggacaaggaatgcatcttggcgtcactcaacatcaaatctatgcagtttgatgacagcatcggggtcttgcaggctaattcccaaggattcacacctcctggaatggacagatcatcacctgacaacagcccagtgcacgggatgttacgccagccgtccatcacaactggggtcaacattcccatcatcacggaactcgtgaatgatactaatgttcagtttttggaccaagatgatgatgatgaccctgacacagagctgtacctcacacagccctttgcttgtgggacagcatctgccgttagcgtcctggactcactcatgagcgcgacatacttcaatgac

SEQ ID NO: 12369 - protein, 971 aa, Rattus norvegicus
  ref <308>: DATABASE ACCESSION NUMBER: SWISS-Prot / AAC32866
  ref <309>: DATABASE ENTRY DATE: 2003-02-01
MSSNIHANHLSLDASSSSSSSSSSSSSSSSSVHEPKMDALIIPVTMEVPCDSRGQRMWWAFLASSMVTFFGGLFIILLWRTLKYLWTVCCHCGGKTKEAQKINNGSSQADGTLKPVDEKEEVVAAEVVWMTSVKDWAGVMISAQTLTGRVLVVLVFALSIGALVIYFIDSSNPIQSCQNFYKDFTLQIDMAFNVFFLLYFGLRFIAANDKLWFWLEVNSVVDFFTVPPVFVSVYLNRSWLGLRFLRALRLIQFSEILQFLNILKTSNSIKLVNLLSIFISTWLTAAGFIHLVENSGDPWENFQNNQALTYWECVYLLMVTMSTVGYGDVYAKTTLGRLFMVFFILGGLAMFASYVPEIIELIGNRKKYGGSYSAVSGRKHIVVCGHITLESVSNFLKDFLHKDRDDVNVEIVFLHNISPNLELEALFKRHFTQVEFYQGSVLNPHDLARVKIESADACLILANKYCADPDAEDASNIMRVISIKNYHPKIRIITQMLQYHNKAHLLNIPSWNWKEGDDSICLAELKLGFIAQSCLAQGLSTMLANLFSMRSFIKIEEDTWQKYYLEGVSNEMYTEYLSSAFVGLSFPTVCELCFVKLKLLMIAIEYKSANRESRSRKRILINPGNHLKIQEGTLGFFIASDAKEVKRAFFYCKACHDDVTDPKRIKKCGCRRLEDEQPPTLSPKKKQRNGGMRNSPNTSPKLMRHDPLLIPGNDQIDNMDSNVKKYDSTGMFHWCAPKEIEKVILTRSEAAMTVLSGHVVVCIFGDVSSALIGLRNLVMPLRASNFHYHELKHIVFVGSIEYLKREWETLHNFPKVSILPGTPLSRADLRAVNLNLCDMCVILSANQNNIDDTSVQDKECILASLNIKSMQFDDSIGVLQANSQGFTPPGMDRSSPDNSPVHGMLRQPSITTGVNIPIITELVNDTNVQFLDQDDDDDPDTELYLTQPFACGTASAVSVLDSLMSATYFND

SEQ ID NO: 12370 - DNA, 3465 bp, Homo sapiens
  ref <308>: DATABASE ACCESSION NUMBER: EMBL / AF025999
  ref <309>: DATABASE ENTRY DATE: 1999-07-05
atgagtagcaatatccacgcgaaccatctcagcctagacgcgtcctcctcctcctcctcctcctcttcctcttcttcttcttcctcctcctcttcctcctcgtcctcggtccacgagcccaagatggatgcgctcatcatcccggtgaccatggaggtgccgtgcgacagccggggccaacgcatgtggtgggctttcctggcctcctccatggtgactttcttcgggggcctcttcatcatcttgctctggcggacgctcaagtacctgtggaccgtgtgctgccactgcgggggcaagacgaaggaggcccagaagattaacaatggctcaagccaggcggatggcactctcaaaccagtggatgaaaaagaggaggcagtggccgccgaggtcggctggatgacctccgtgaaggactgggcgggggtgatgatatccgcccagacactgactggcagagtcctggttgtcttagtctttgctctcagcatcggtgcacttgtaatatacttcatagattcatcaaacccaatagaatcctgccagaatttctacaaagatttcacattacagatcgacatggctttcaacgtgttcttccttctctacttcggcttgcggtttattgcagccaacgataaattgtggttctggctggaagtgaactctgtagtggatttcttcacggtgccccccgtgtttgtgtctgtgtacttaaacagaagttggcttggtttgagatttttaagagctctgagactgatacagttttcagaaattttgcagtttctgaatattcttaaaacaagtaattccatcaagctggtgaatctgctctccatatttatcagcacgtggctgactgcagccgggttcatccatttggtggagaattcaggggacccatgggaaaatttccaaaacaaccaggctctcacctactgggaatgtgtctatttactcatggtcacaatgtccaccgttggttatggggatgtttatgcaaaaaccacacttgggcgcctcttcatggtcttcttcatcctcgggggactggccatgtttgccagctacgtccctgaaatcatagagttaataggaaaccgcaagaaatacgggggctcctatagtgcggttagtggaagaaagcacattgtggtctgcggacacatcactctggagagtgtttccaacttcctgaaggactttctgcacaaggaccgggatgacgtcaatgtggagatcgtttttcttcacaacatctcccccaacctggagcttgaagctctgttcaaacgacattttactcaggtggaattttatcagggttccgtcctcaatccacatgatcttgcaagagtcaagatagagtcagcagatgcatgcctgatccttgccaacaagtactgcgctgacccggatgcggaggatgcctcgaatatcatgagagtaatctccataaagaactaccatccgaagataagaatcatcactcaaatgctgcagtatcacaacaaggcccatctgctaaacatcccgagctggaattggaaagaaggtgatgacgcaatctgcctcgcagagttgaagttgggcttcatagcccagagctgcctggctcaaggcctctccaccatgcttgccaacctcttctccatgaggtcattcataaagattgaggaagacacatggcagaaatactacttggaaggagtctcaaatgaaatgtacacagaatatctctccagtgccttcgtgggtctgtccttccctactgtttgtgagctgtgttttgtgaagctcaagctcctaatgatagccattgagtacaagtctgccaaccgagagagccgtatattaattaatcctggaaaccatcttaagatccaagaaggtactttaggatttttcatcgcaagtgatgccaaagaagttaaaagggcatttttttactgcaaggcctgtcatgatgacatcacagatcccaaaagaataaaaaaatgtggctgcaaacggcttgaagatgagcagccgtcaacactatcaccaaaaaaaaagcaacggaatggaggcatgcggaactcacccaacacctcgcctaagctgatgaggcatgaccccttgttaattcctggcaatgatcagattgacaacatggactccaatgtgaagaagtacgactctactgggatgtttcactggtgtgcacccaaggagatagagaaagtcatcctgactcgaagtgaagctgccatgaccgtcctgagtggccatgtcgtggtctgcatctttggcgacgtcagctcagccctgatcggcctccggaacctggtgatgccgctccgtgccagcaactttcattaccatgagctcaagcacattgtgtttgtgggctctattgagtacctcaagcgggaatgggagacgcttcataacttccccaaagtgtccatattgcctggtacgccattaagtcgggctgatttaagggctgtcaacatcaacctctgtgacatgtgcgttatcctgtcagccaatcagaataatattgatgatacttcgctgcaggacaaggaatgcatcttggcgtcactcaacatcaaatctatgcagtttgatgacagcatcggagtcttgcaggctaattcccaagggttcacacctccaggaatggatagatcctctccagataacagcccagtgcacgggatgttacgtcaaccatccatcacaactggggtcaacatccccatcatcactgaactagtgaacgatactaatgttcagtttttggaccaagacgatgatgatgaccctgatacagaactgtacctcacgcagccctttgcctgtgggacagcatttgccgtcagtgtcctggactcactcatgagcgcgacgtacttcaatgacaatatcctcaccctgatacggaccctggtgaccggaggagccacgccggagctggaggctctgattgctgaggaaaacgcccttagaggtggctacagcaccccgcagacactggccaatagggaccgctgccgcgtggcccagttagctctgctcgatgggccatttgcggacttaggggatggtggttgttatggtgatctgttctgcaaagctctgaaaacatataatatgctttgttttggaatttaccggctgagagatgctcacctcagcacccccagtcagtgcacaaagaggtatgtcatcaccaacccgccctatgagtttgagctcgtgccgacggacctgatcttctgcttaatgcagtttgaccacaatgccggccagtcccgggccagcctgtcccattcctcccactcgtcgcagtcctccagcaagaagagctcctctgttcactccatcccatccacagcaaaccgacagaaccggcccaagtccagggagtcccgggacaaacagaagtacgtgcaggaagagcggctttga

SEQ ID NO: 12371 - protein, 1154 aa, Homo sapiens
  ref <308>: DATABASE ACCESSION NUMBER: SWISS-Prot / AAB88802
  ref <309>: DATABASE ENTRY DATE: 2003-02-01
MSSNIHANHLSLDASSSSSSSSSSSSSSSSSSSSSSVHEPKMDALIIPVTMEVPCDSRGQRMWWAFLASSMVTFFGGLFIILLWRTLKYLWTVCCHCGGKTKEAQKINNGSSQADGTLKPVDEKEEAVAAEVGWMTSVKDWAGVMISAQTLTGRVLVVLVFALSIGALVIYFIDSSNPIESCQNFYKDFTLQIDMAFNVFFLLYFGLRFIAANDKLWFWLEVNSVVDFFTVPPVFVSVYLNRSWLGLRFLRALRLIQFSEILQFLNILKTSNSIKLVNLLSIFISTWLTAAGFIHLVENSGDPWENFQNNQALTYWECVYLLMVTMSTVGYGDVYAKTTLGRLFMVFFILGGLAMFASYVPEIIELIGNRKKYGGSYSAVSGRKHIVVCGHITLESVSNFLKDFLHKDRDDVNVEIVFLHNISPNLELEALFKRHFTQVEFYQGSVLNPHDLARVKIESADACLILANKYCADPDAEDASNIMRVISIKNYHPKIRIITQMLQYHNKAHLLNIPSWNWKEGDDAICLAELKLGFIAQSCLAQGLSTMLANLFSMRSFIKIEEDTWQKYYLEGVSNEMYTEYLSSAFVGLSFPTVCELCFVKLKLLMIAIEYKSANRESRILINPGNHLKIQEGTLGFFIASDAKEVKRAFFYCKACHDDITDPKRIKKCGCKRLEDEQPSTLSPKKKQRNGGMRNSPNTSPKLMRHDPLLIPGNDQIDNMDSNVKKYDSTGMFHWCAPKEIEKVILTRSEAAMTVLSGHVVVCIFGDVSSALIGLRNLVMPLRASNFHYHELKHIVFVGSIEYLKREWETLHNFPKVSILPGTPLSRADLRAVNINLCDMCVILSANQNNIDDTSLQDKECILASLNIKSMQFDDSIGVLQANSQGFTPPGMDRSSPDNSPVHGMLRQPSITTGVNIPIITELVNDTNVQFLDQDDDDDPDTELYLTQPFACGTAFAVSVLDSLMSATYFNDNILTLIRTLVTGGATPELEALIAEENALRGGYSTPQTLANRDRCRVAQLALLDGPFADLGDGGCYGDLFCKALKTYNMLCFGIYRLRDAHLSTPSQCTKRYVITNPPYEFELVPTDLIFCLMQFDHNAGQSRASLSHSSHSSQSSSKKSSSVHSIPSTANRQNRPKSRESRDKQKYVQEERL

SEQ ID NO: 12372 - DNA, 1234 bp, Rattus norvegicus; identical to SEQ ID NO: 1184
  ref <308>: DATABASE ACCESSION NUMBER: EMBL / AF086758
  ref <309>: DATABASE ENTRY DATE: 1999-10-29

SEQ ID NO: 12373 - protein, 369 aa, Rattus norvegicus; identical to SEQ ID NO: 1185
  ref <308>: DATABASE ACCESSION NUMBER: SWISS-Prot / AAD09008
  ref <309>: DATABASE ENTRY DATE: 2003-02-01

SEQ ID NO: 12374 - DNA, 4098 bp, Homo sapiens; identical to SEQ ID NO: 1186
  ref <308>: DATABASE ACCESSION NUMBER: Refseq / NM_001046
  ref <309>: DATABASE ENTRY DATE: 2000-10-31

SEQ ID NO: 12375 - protein, 1212 aa, Homo sapiens; identical to SEQ ID NO: 1187
  ref <308>: DATABASE ACCESSION NUMBER: Refseq / NP_001037
  ref <309>: DATABASE ENTRY DATE: 2000-10-31

SEQ ID NO: 12376 - DNA, 462 bp, Rattus norvegicus
  ref <308>: DATABASE ACCESSION NUMBER: EMBL / AF089839
  ref <309>: DATABASE ENTRY DATE: 1998-10-08
cgaaaatgggctggactttctattgggcaggacatagaagtcgccttgtattcgtttgacaaagccaagcagtgcatcggcacaatgaccatcgagatcgacttcctgcagaaaaagaacatcgactccaacccttacgacaccgacaagatggctgccgagttcatccagcagttcaacaaccaggccttctcagtgggacagcagcttgtctttagcttcaatgataagctctttggattgctggtgaaggacatcgaagccatggatcccagcatcctgaagggagagcctgcgtcaggtaaaaggcagaagattgaagtaggactggtcgttggaaacagtcaagttgcatttgaaaaagcagaaaactcatcactcaatcttattggcaaggctaaaaccaaggaaaatcgccagtctatcatcaatcccgactggaactttgagaaaatggggatc

SEQ ID NO: 12377 - protein, 744 aa, Rattus norvegicus
  ref <308>: DATABASE ACCESSION NUMBER: SWISS-Prot / AAF01051
  ref <309>: DATABASE ENTRY DATE: 2002-10-01
MAGRTMQAARCPTDELSLSNCAVVNEKDYQSGQHVMVRTSPNHKYIFTLRTHPSVVPGCIAFSLPQRKWAGLSIGQDIEVALYSFDKAKQCIGTMTIEIDFLQKKNIDSNPYDTDKMAAEFIQQFNHQAFSVGQQLVFSFNDKLFGLLVKDIEAMDPSILKGEPASGKRQKIEVGLVVGNSQVAFEKAENSSLNLIGKAKTKENRQSIINPDWNFEKMGIGGLDKEFSDIFRRAFASRVFPPEIVEQMGCKHVKGILLYGPPGCGKTLLARQIGKMLNAREPKVVNGPEILNKYVGESEANIRKLFADAEEEQRRLGANSGLHIIIFDEIDAICKQRGSMAGSTGVHDTVVNQLLSKIDGVEQLNNILVIGMTNRPDLIDEALLRPGRLEVKMEIGLPDEKGRLQILHIHTARMRGHQLLSADVDIKELAVETKNFSGAELEGLVRAAQSTAMNRHIKASTKVEVDMEKAESLQVTRGDFLASLENDIKPAFGTNQEDYASYIMNGIIKWGDPVTRVLDDGELLVQQTKNSDRTPLVSVLLEGPPHSGKTALAAKIAEESNFPFIKICSPDKMIGFSETAKCQAMKKIFDDAYKSQLSCVVVDDIERLLDYVPIGPRFSNLVLQALLVLLKKAPPQGRKLLIIGTTSRKDVLQEMEMLNAFSTTIHVPNIATGEQLLEALELLGNFKDKERTTIAQQVKGKKVWIGIKKLLMLIEMSLQMDPEYRVRKFLALMREEGASPLDFD

SEQ ID NO: 12378 - DNA, 3677 bp, Homo sapiens
  ref <308>: DATABASE ACCESSION NUMBER: Refseq / XM_032173
  ref <309>: DATABASE ENTRY DATE: 2002-08-01
cagagaaaatgggctgggctttctattgggcaagaaatagaagtctccttatatacatttgacaaagccaaacagtgtattggcacaatgaccatcgagattgatttcctgcagaaaaaaagcattgactccaacccttatgacaccgacaagatggcagcagaatttattcagcaattcaacaaccaggccttctcagtgggacaacagcttgtctttagcttcaatgaaaagctttttggcttactggtgaaggacattgaagccatggatcctagcatcctgaagggagagcctgcgacagggaaaaggcagaagattgaagtaggactggttgttggaaacagtcaagttgcatttgaaaaagcagaaaattcgtcacttaatcttattggcaaagctaaaaccaaggaaaatcgccaatcaattatcaatcctgactggaactttgaaaaaatgggaataggaggtctagacaaggaattttcagatattttccgacgagcatttgcttcccgagtatttcctccagagattgtggagcagatgggttgtaaacatgttaaaggcatcctgttatatggacccccaggttgtggtaagactctcttggctcgacagattggcaagatgttgaatgcaagagagcccaaagtggtcaatgggccagaaatccttaacaaatatgtgggagaatcagaggctaacattcgcaaactttttgctgatgctgaagaggagcaaaggaggcttggtgctaacagtggtttgcacatcatcatctttgatgaaattgatgccatctgcaagcagagagggagcatggctggtagcacgggagttcatgacactgttgtcaaccagttgctgtccaaaattgatggcgtggagcagctaaacaacatcctagtcattggaatgaccaatagaccagatctgatagatgaggctcttcttagacctggaagactggaagttaaaatggagataggcttgccagatgagaaaggccgactacagattcttcacatccacacagcaagaatgagagggcatcagttactctctgctgatgtagacattaaagaactggccgtggagaccaagaatttcagtggtgctgaattggagggtctggtgcgagcagcccagtccactgctatgaatagacacataaaggccagtactaaagtggaagtggacatggagaaagcagaaagcctgcaagtgacgagaggagacttccttgcttctttggagaatgatatcaaaccagcctttggcacaaaccaagaagattatgcaagttacattatgaacggtatcatcaaatggggtgacccagttactcgagttctagatgatggggagctgctggtgcagcagactaagaacagtgaccgcacaccattggtcagcgtgcttctggaaggccctcctcacagtgggaagactgctttagctgcaaaaattgcagaggaatccaacttcccgttcatcaagatctgttctcctgataaaatgattggcttttctgaaacagccaaatgtcaggccatgaagaagatctttgatgatgcgtacaaatcccagctcagttgtgtggttgtggatgacattgagagattgcttgattacgtccctattggccctcgattttcaaatcttgtattacaggctcttctcgttttactgaaaaaggcacctcctcagggccgcaagcttcttatcattgggaccactagccgcaaagatgtccttcaggagatggaaatgcttaacgctttcagcaccaccatccacgtgcccaacattgccacaggagagcagctgttggaagctttggagcttttgggcaacttcaaggataaggaacgcaccacaattgcacagcaagtcaaagggaagaaggtctggataggaatcaagaagttactaatgctgatcgagatgtccctacagatggatcctgaataccgtgtgagaaaattcttggccctcttaagagaagaaggagctagcccccttgattttgattgaaaatgaactatttgaaacacacagtgaccaagggaagtgaccaaggtgaagatggcctaggatcttcactgtcttactcaagatactggactaagtggaacgttctctaccttcaacatgtgctcgctctgcatgattagtgcaataaaactcccttccttatgcatactgagatagcttagtgtctcgtggaaggtgtcaatttggtttagaatgctgcgcttaccttcccatgcaggctaaagtgattccttcttgctcagtccctctgggtgggaaccatccagtacttgtggacactacacgtttcaacctctctactagcaccatcacccttgaaaactctcagtcagtgtcatgaatgttgcatgacaacagttggccgattagaaggcagactttctacatgcaaatctggcttagtaaatcgaggtgtgggccagagatcctctgacagctgtcctgagctaacactaaaagtcactgggtatttggttaaaggtctcccacaagactggtattctctttgcctgaagaaacaaggcattgaatctctaaaatgctgttctcaatcattgtcagagatgttttcaagttgcagtcagaagatctttcttaatagaaagtcagatgactaccgtgttggttgtgacttccccttaagtataactaatttgctctgtggtaagagatatgctcattattaccacttagaagatgttgttaaaaacatgtgaaagataggtatggaaaaagcatacacccccaaacagaaaggagttattaaagtaatttacaaacctctcagcactaattagtgtccaactccaagtgggtcaattccttagtataatattaaggcttactagtatcactgctttttccttagcttaatgacttacttagaatttatcctttattttaaatgatctgtactatctagtgtctaaaacactattctccagaaaaatcaatcattttctagccctctccctcagtcctttattgtccattccaatacattgaacacatttcctttaccctccacacacttcttccaaaaggaagcacccgttgagtccttttgagggtgatttgtcttacaactgactgacttagcaggaatttaattaggtcatatttggtgatgagacttatggagtgtgcctctctctcccaactgctgcttaaaatgcaaggacaagcaattagaagccatcctaaggtgcttacctcacacgccacccatgaggcttgtggccacagtggcacttgggtgtggctcctctgttatttgtcctcatgtgagaaagcagatcatctccaaatcttgccatttgtatacttttggtggagacttggatgtcatatcttctttgttttgggttttcttccctagcttattttgtggcttttaaagaagtggattgtattgtgagatcctgtgattcctggtggccagtatcctggattcctctaagatcttgcctctttcctcctcatgaaagcagcacacattgtgttaacttatgtctcttgttaaatgagcttaatgtctttgtgttttgtccaaaactgtattgaaaaaatattgtttaatgcaaatgaaggaatgcaataaagagtaaatatacttg

SEQ ID NO: 12379 - protein, 650 aa, Homo sapiens
  ref <308>: DATABASE ACCESSION NUMBER: Refseq / XP_032173
  ref <309>: DATABASE ENTRY DATE: 2002-08-01
MTIEIDFLQKKSIDSNPYDTDKMAAEFIQQFNNQAFSVGQQLVFSFNEKLFGLLVKDIEAMDPSILKGEPATGKRQKIEVGLVVGNSQVAFEKAENSSLNLIGKAKTKENRQSIINPDWNFEKMGIGGLDKEFSDIFRRAFASRVFPPEIVEQMGCKHVKGILLYGPPGCGKTLLARQIGKMLNAREPKVVNGPEILNKYVGESEANIRKLFADAEEEQRRLGANSGLHIIIFDEIDAICKQRGSMAGSTGVHDTVVNQLLSKIDGVEQLNNILVIGMTNRPDLIDEALLRPGRLEVKMEIGLPDEKGRLQILHIHTARMRGHQLLSADVDIKELAVETKNFSGAELEGLVRAAQSTAMNRHIKASTKVEVDMEKAESLQVTRGDFLASLENDIKPAFGTNQEDYASYIMNGIIKWGDPVTRVLDDGELLVQQTKNSDRTPLVSVLLEGPPHSGKTALAAKIAEESNFPFIKICSPDKMIGFSETAKCQAMKKIFDDAYKSQLSCVVVDDIERLLDYVPIGPRFSNLVLQALLVLLKKAPPQGRKLLIIGTTSRKDVLQEMEMLNAFSTTIHVPNIATGEQLLEALELLGNFKDKERTTIAQQVKGKKVWIGIKKLLMLIEMSLQMDPEYRVRKFLALLREEGASPLDFD

SEQ ID NO: 12380 - DNA, 462 bp, Rattus norvegicus; identical to SEQ ID NO: 12376
  ref <308>: DATABASE ACCESSION NUMBER: EMBL / AF089839
  ref <309>: DATABASE ENTRY DATE: 1998-10-08

SEQ ID NO: 12381 - protein, 744 aa, Rattus norvegicus; identical to SEQ ID NO: 12377
  ref <308>: DATABASE ACCESSION NUMBER: SWISS-Prot / AAF01051
  ref <309>: DATABASE ENTRY DATE: 2002-10-01

SEQ ID NO: 12382 - DNA, 3677 bp, Homo sapiens; identical to SEQ ID NO: 12378
  ref <308>: DATABASE ACCESSION NUMBER: Refseq / XM_032173
  ref <309>: DATABASE ENTRY DATE: 2002-08-01

SEQ ID NO: 12383 - protein, 650 aa, Homo sapiens; identical to SEQ ID NO: 12379
  ref <308>: DATABASE ACCESSION NUMBER: Refseq / XP_032173
  ref <309>: DATABASE ENTRY DATE: 2002-08-01

SEQ ID NO: 12384 - DNA, 570 bp, Rattus norvegicus; identical to SEQ ID NO: 1204
  ref <308>: DATABASE ACCESSION NUMBER: EMBL / AF090134
  ref <309>: DATABASE ENTRY DATE: 2000-11-28

SEQ ID NO: 12385 - protein, 182 aa, Rattus norvegicus; identical to SEQ ID NO: 1205
  ref <308>: DATABASE ACCESSION NUMBER: SWISS-Prot / AAC78073
  ref <309>: DATABASE ENTRY DATE: 2003-02-01

SEQ ID NO: 12386 - DNA, 1176 bp, Homo sapiens; identical to SEQ ID NO: 1206
  ref <308>: DATABASE ACCESSION NUMBER: Refseq / NM_004664
  ref <309>: DATABASE ENTRY DATE: 2002-09-30

SEQ ID NO: 12387 - protein, 233 aa, Homo sapiens; identical to SEQ ID NO: 1207
  ref <308>: DATABASE ACCESSION NUMBER: Refseq / NP_004655
  ref <309>: DATABASE ENTRY DATE: 2002-09-30

SEQ ID NO: 12388 - DNA, 707 bp, Rattus norvegicus
  ref <308>: DATABASE ACCESSION NUMBER: EMBL / AF090692
  ref <309>: DATABASE ENTRY DATE: 2000-03-03
ataaatgtgaactgagagtgctggagacccagaagaaccacaagctggggtggccagagtgaggaacgagcccagcaggaagagcaagttggacagtcacagaaagtttgacagacctacagtggctgcttcattgcagctcaagccccaaggagacgtggaggacatcacttgtaccttttgactgagggaccatgacaaaacccttgttgctctccttgatcttcttcatcattccagcggccctggcagttgatgtggatcagtctaagaatgaagtgaaggcacagaggtactttggatccattagtatctccaatgccaatgtgaagcaatgtgtttggtttgccatgaaagaatacaacaaaggaagtgaggacaaatacctcttccttctggacaagacactccatgccacacttcagatcacagaccgcatggaataccacattgatgttcagatctcccgcagcaattgcagaaaacctttaaacaatactgaaaactgcatccctcaaaaaaatcccaaactggaaaagaaattaagttgcagctttctggtaggagcacttccctggaatggtgagttcgacctgttgagcaaagaatgcaaagatgtctaagggtgtcttggtgtgcgcctcccccttctgggtctgcttttctctgtaataaagagcaacatctggttcaagtctgtcaccaac

SEQ ID NO: 12389 - protein, 142 aa, Rattus norvegicus
  ref <308>: DATABASE ACCESSION NUMBER: SWISS-Prot / AAC36317
  ref <309>: DATABASE ENTRY DATE: 2002-06-15
MTKPLLLSLIFFIIPAALAVDVDQSKNEVKAQRYFGSISISNANVKQCVWFAMKEYNKGSEDKYLFLLDKTLHATLQITDRMEYHIDVQISRSNCRKPLNNTENCIPQKNPKLEKKLSCSFLVGALPWNGEFDLLSKECKDV

SEQ ID NO: 12390 - DNA, 895 bp, Homo sapiens
  ref <308>: DATABASE ACCESSION NUMBER: Refseq / NM_005492
  ref <309>: DATABASE ENTRY DATE: 2002-11-05
ctgggccacaggcatgaactaagagtgctgaagacctaggagaaccactggtcaggtcagctcccagctccacagggagtaagaaggagctgcaggcacagcaggctgaaagtccaccaagggctgaggccacaaggcctctggggcagccacagttttcatgatcacatcatacaggactgagaagcagataacaagagtgacgctcacagggctgggctgacgctaacaggaggcagtgtgtggctcgaagattcttgaacccacagcagcagctgcggccaccccatcctgcccacagctccagccctgagacgacgaggaggagagtcgactttgcctcttgcccaagggaccatgcccaggtgccggtggctctccctgatcctcctcaccattcccctggccctggtggccaggaaagacccaaaaaagaatgagacaggggtgctgaggaaattaaaacccgtcaatgcctcaaatgccaacgtgaagcagtgtctgtggtttgccatgcaagaatacaacaaagagagcgaggacaagtatgtcttcctggtggtcaagacactgcaagcccagcttcaggtcacaaatcttctggaataccttattgatgtagaaattgcccgcagcgattgcagaaagcctttaagcactaatgaaatctgcgccattcaagaaaactccaagctgaaaaggaaattaagctgcagctttttggtaggagcacttccctggaatggtgaattcactgtgatggagaaaaagtgtgaagatgcttaatggtgttttgaggcatccctccaacctctgtgactactttatccatgaaaatgaagcaatggcaggtgggaggctcttcccaatgtgctttcttcatgcatgccaaaaa

SEQ ID NO: 12391 - protein, 142 aa, Homo sapiens
  ref <308>: DATABASE ACCESSION NUMBER: Refseq / NP_005483
  ref <309>: DATABASE ENTRY DATE: 2002-11-05
MPRCRWLSLILLTIPLALVARKDPKKNETGVLRKLKPVNASNANVKQCLWFAMQEYNKESEDKYVFLVVKTLQAQLQVTNLLEYLIDVEIARSDCRKPLSTNEICAIQENSKLKRKLSCSFLVGALPWNGEFTVMEKKCEDA

SEQ ID NO: 12392 - DNA, 707 bp, Rattus norvegicus; identical to SEQ ID NO: 12388
  ref <308>: DATABASE ACCESSION NUMBER: EMBL / AF090692
  ref <309>: DATABASE ENTRY DATE: 2000-03-03

SEQ ID NO: 12393 - protein, 142 aa, Rattus norvegicus; identical to SEQ ID NO: 12389
  ref <308>: DATABASE ACCESSION NUMBER: SWISS-Prot / AAC36317
  ref <309>: DATABASE ENTRY DATE: 2002-06-15

SEQ ID NO: 12394 - DNA, 895 bp, Homo sapiens; identical to SEQ ID NO: 12390
  ref <308>: DATABASE ACCESSION NUMBER: Refseq / NM_005492
  ref <309>: DATABASE ENTRY DATE: 2002-11-05

SEQ ID NO: 12395 - protein, 142 aa, Homo sapiens; identical to SEQ ID NO: 12391
  ref <308>: DATABASE ACCESSION NUMBER: Refseq / NP_005483
  ref <309>: DATABASE ENTRY DATE: 2002-11-05

SEQ ID NO: 12396 - DNA, 669 bp, Rattus norvegicus; identical to SEQ ID NO: 1216
  misc_feature (1)..(669): n=a, c, g or t
  ref <308>: DATABASE ACCESSION NUMBER: EMBL / AF091563
  ref <309>: DATABASE ENTRY DATE: 1998-10-20

SEQ ID NO: 12397 - protein, 223 aa, Rattus norvegicus; identical to SEQ ID NO: 1217
  misc_feature (1)..(223): Xaa=Unknown amino acid
  ref <308>: DATABASE ACCESSION NUMBER: SWISS-Prot / AAC64586
  ref <309>: DATABASE ENTRY DATE: 2003-02-01

SEQ ID NO: 12398 - DNA, 31737 bp, Homo sapiens; identical to SEQ ID NO: 1214
  ref <308>: DATABASE ACCESSION NUMBER: EMBL / AF321237
  ref <309>: DATABASE ENTRY DATE: 2001-06-21

SEQ ID NO: 12399 - protein, 315 aa, Homo sapiens; identical to SEQ ID NO: 1219
  ref <308>: DATABASE ACCESSION NUMBER: SWISS-Prot / AAG45205
  ref <309>: DATABASE ENTRY DATE: 2002-06-15

SEQ ID NO: 12400 - DNA, 669 bp, Rattus norvegicus; identical to SEQ ID NO: 1216
  misc_feature (1)..(669): n=a, c, g or t
  ref <308>: DATABASE ACCESSION NUMBER: EMBL / AF091563
  ref <309>: DATABASE ENTRY DATE: 1998-10-20

SEQ ID NO: 12401 - protein, 223 aa, Rattus norvegicus; identical to SEQ ID NO: 1217
  misc_feature (1)..(223): Xaa=Unknown amino acid
  ref <308>: DATABASE ACCESSION NUMBER: SWISS-Prot / AAC64586
  ref <309>: DATABASE ENTRY DATE: 2003-02-01

SEQ ID NO: 12402 - DNA, 31737 bp, Homo sapiens; identical to SEQ ID NO: 1214
  ref <308>: DATABASE ACCESSION NUMBER: EMBL / AF321237
  ref <309>: DATABASE ENTRY DATE: 2001-06-21

SEQ ID NO: 12403 - protein, 315 aa, Homo sapiens; identical to SEQ ID NO: 1219
  ref <308>: DATABASE ACCESSION NUMBER: SWISS-Prot / AAG45205
  ref <309>: DATABASE ENTRY DATE: 2002-06-15

SEQ ID NO: 12404 - DNA, 669 bp, Rattus norvegicus; identical to SEQ ID NO: 1216
  misc_feature (1)..(669): n=a, c, g or t
  ref <308>: DATABASE ACCESSION NUMBER: EMBL / AF091563
  ref <309>: DATABASE ENTRY DATE: 1998-10-20

SEQ ID NO: 12405 - protein, 223 aa, Rattus norvegicus; identical to SEQ ID NO: 1217
  misc_feature (1)..(223): Xaa=Unknown amino acid
  ref <308>: DATABASE ACCESSION NUMBER: SWISS-Prot / AAC64586
  ref <309>: DATABASE ENTRY DATE: 2003-02-01

SEQ ID NO: 12406 - DNA, 31737 bp, Homo sapiens; identical to SEQ ID NO: 1214
  ref <308>: DATABASE ACCESSION NUMBER: EMBL / AF321237
  ref <309>: DATABASE ENTRY DATE: 2001-06-21

SEQ ID NO: 12407 - protein, 315 aa, Homo sapiens; identical to SEQ ID NO: 1219
  ref <308>: DATABASE ACCESSION NUMBER: SWISS-Prot / AAG45205
  ref <309>: DATABASE ENTRY DATE: 2002-06-15

SEQ ID NO: 12408 - DNA, 669 bp, Rattus norvegicus; identical to SEQ ID NO: 1216
  misc_feature (1)..(669): n=a, c, g or t
  ref <308>: DATABASE ACCESSION NUMBER: EMBL / AF091563
  ref <309>: DATABASE ENTRY DATE: 1998-10-20

SEQ ID NO: 12409 - protein, 223 aa, Rattus norvegicus; identical to SEQ ID NO: 1217
  misc_feature (1)..(223): Xaa=Unknown amino acid
  ref <308>: DATABASE ACCESSION NUMBER: SWISS-Prot / AAC64586
  ref <309>: DATABASE ENTRY DATE: 2003-02-01

SEQ ID NO: 12410 - DNA, 31737 bp, Homo sapiens; identical to SEQ ID NO: 1214
  ref <308>: DATABASE ACCESSION NUMBER: EMBL / AF321237
  ref <309>: DATABASE ENTRY DATE: 2001-06-21

SEQ ID NO: 12411 - protein, 315 aa, Homo sapiens; identical to SEQ ID NO: 1219
  ref <308>: DATABASE ACCESSION NUMBER: SWISS-Prot / AAG45205
  ref <309>: DATABASE ENTRY DATE: 2002-06-15

SEQ ID NO: 12412 - DNA, 663 bp, Rattus norvegicus; identical to SEQ ID NO: 1232
  ref <308>: DATABASE ACCESSION NUMBER: EMBL / AF091578
  ref <309>: DATABASE ENTRY DATE: 1998-10-20

SEQ ID NO: 12413 - protein, 221 aa, Rattus norvegicus; identical to SEQ ID NO: 1233
  ref <308>: DATABASE ACCESSION NUMBER: SWISS-Prot / AAC64598
  ref <309>: DATABASE ENTRY DATE: 2003-02-01

SEQ ID NO: 12414 - DNA, 945 bp, Homo sapiens; identical to SEQ ID NO: 1234
  ref <308>: DATABASE ACCESSION NUMBER: Refseq / NM_006637
  ref <309>: DATABASE ENTRY DATE: 2000-11-01

SEQ ID NO: 12415 - protein, 314 aa, Homo sapiens; identical to SEQ ID NO: 1235
  ref <308>: DATABASE ACCESSION NUMBER: Refseq / NP_006628
  ref <309>: DATABASE ENTRY DATE: 2000-11-01

SEQ ID NO: 12416 - DNA, 1660 bp, Rattus norvegicus; identical to SEQ ID NO: 1248
  ref <308>: DATABASE ACCESSION NUMBER: EMBL / AF092523
  ref <309>: DATABASE ENTRY DATE: 2000-03-03

SEQ ID NO: 12417 - protein, 854 aa, Rattus norvegicus; identical to SEQ ID NO: 1249
  ref <308>: DATABASE ACCESSION NUMBER: SWISS-Prot / AAC61775
  ref <309>: DATABASE ENTRY DATE: 2002-06-15

SEQ ID NO: 12418 - DNA, 3149 bp, Homo sapiens; identical to SEQ ID NO: 1250
  ref <308>: DATABASE ACCESSION NUMBER: EMBL / BC000729
  ref <309>: DATABASE ENTRY DATE: 2001-07-13

SEQ ID NO: 12419 - protein, 903 aa, Homo sapiens; identical to SEQ ID NO: 1251
  ref <308>: DATABASE ACCESSION NUMBER: SWISS-Prot / AAH00729
  ref <309>: DATABASE ENTRY DATE: 2002-06-15

SEQ ID NO: 12420 - DNA, 1660 bp, Rattus norvegicus; identical to SEQ ID NO: 1248
  ref <308>: DATABASE ACCESSION NUMBER: EMBL / AF092523
  ref <309>: DATABASE ENTRY DATE: 2000-03-03

SEQ ID NO: 12421 - protein, 854 aa, Rattus norvegicus; identical to SEQ ID NO: 1249
  ref <308>: DATABASE ACCESSION NUMBER: SWISS-Prot / AAC61775
  ref <309>: DATABASE ENTRY DATE: 2002-06-15

SEQ ID NO: 12422 - DNA, 3149 bp, Homo sapiens; identical to SEQ ID NO: 1250
  ref <308>: DATABASE ACCESSION NUMBER: EMBL / BC000729
  ref <309>: DATABASE ENTRY DATE: 2001-07-13

SEQ ID NO: 12423 - protein, 903 aa, Homo sapiens; identical to SEQ ID NO: 1251
  ref <308>: DATABASE ACCESSION NUMBER: SWISS-Prot / AAH00729
  ref <309>: DATABASE ENTRY DATE: 2002-06-15

SEQ ID NO: 12424 - DNA, 582 bp, Rattus norvegicus
  ref <308>: DATABASE ACCESSION NUMBER: EMBL / AF096291
  ref <309>: DATABASE ENTRY DATE: 2000-03-03
atggcgaccccagcctcaaccccagacacacgggctctagtggctgactttgtaggctataagctgaggcagaagggttatgtctgtggagctggccctggggaaggcccagcagccgacccgctgcaccaagccatgcgggcagctggagacgagtttgagacccgcttccggcgcaccttctctgacctggccgctcagctacacgtgaccccaggctcagcccagcaacgcttcacccaggtttccgacgaacttttccaagggggccccaactggggccgtcttgtggcattctttgtctttggggctgccctgtgtgctgagagtgtcaacaaagaaatggagccattggtgggacaagtgcaggattggatggtgacctacctggagacacgcttggctgactggatccacagcagtgggggctgggcggagttcacagctctatacggggacggggccctggaggaggcacggcgtctgcgggaggggaactgggcatcagtgaggacagtgctgacgggggctgtggcactgggggccctggtaactgtaggggccttttttgctagcaagtga

SEQ ID NO: 12425 - protein, 192 aa, Rattus norvegicus
  ref <308>: DATABASE ACCESSION NUMBER: SWISS-Prot / 1AF3
  ref <309>: DATABASE ENTRY DATE: 2003-02-01
MDGSGEQLGSGGPTSSEQIMKTGAFLLQGFIQDRAGRMAGETPELTLEQPPQDASTKKLSECLRRIGDELDSNMELQRMIADVDTDSPREVFFRVAADMFADGNFNWGRVVALFYFASKLVLKALCTKVPELIRTIMGWTLDFLRERLLVWIQDQGGWEGLLSYFGTPTWQTVTIFVAGVLTASLTIWKKMG

SEQ ID NO: 12426 - DNA, 582 bp, Homo sapiens
  ref <308>: DATABASE ACCESSION NUMBER: EMBL / U59747
  ref <309>: DATABASE ENTRY DATE: 1999-07-02
atggcgaccccagcctcggccccagacacacgggctctggtggcagactttgtaggttataagctgaggcagaagggttatgtctgtggagctggccccggggagggcccagcagctgacccgctgcaccaagccatgcgggcagctggagatgagttcgagacccgcttccggcgcaccttctctgatctggcggctcagctgcatgtgaccccaggctcagcccagcaacgcttcacccaggtctccgacgaactttttcaagggggccccaactggggccgccttgtagccttctttgtctttggggctgcactgtgtgctgagagtgtcaacaaggagatggaaccactggtgggacaagtgcaggagtggatggtggcctacctggagacgcggctggctgactggatccacagcagtgggggctgggcggagttcacagctctatacggggacggggccctggaggaggcgcggcgtctgcgggaggggaactgggcatcagtgaggacagtgctgacgggggccgtggcactgggggccctggtaactgtaggggccttttttgctagcaagtga

SEQ ID NO: 12427 - protein, 193 aa, Homo sapiens
  ref <308>: DATABASE ACCESSION NUMBER: SWISS-Prot / Q92843
  ref <309>: DATABASE ENTRY DATE: 2002-06-15
MATPASAPDTRALVADFVGYKLRQKGYVCGAGPGEGPAADPLHQAMRAAGDEFETRFRRTFSDLAAQLHVTPGSAQQRFTQVSDELFQGGPNWGRLVAFFVFGAALCAESVNKEMEPLVGQVQEWMVAYLETRLADWIHSSGGWAEFTALYGDGALEEARRLREGNWASVRTVLTGAVALGALVTVGAFFASK

SEQ ID NO: 12428 - DNA, 1230 bp, Rattus norvegicus
  ref <308>: DATABASE ACCESSION NUMBER: EMBL / AF097887
  ref <309>: DATABASE ENTRY DATE: 1999-04-14
ggaattcggcacgagagattgtcagcgtccggctgcggaacctgcctccctgagcgccgcgagctggtccgggctggcccctctgctaccccgggagcggccatgccgccgcgggagctgagcgaggccgagccaccgcctctcccggcctcgacccctcctccgcggcggcgcagcgcccctccggagctgggcatcaaatgcgtgctggtgggcgatggcgcggtgggcaagagcagcctcatcgtcagctacacctgcaatggatacccctcgcgctatcggcctacagcactggacactttctccgtgcaagtcctggtagatggagcccctgtgcgaattgagctctgggacacagcagggcaggaggactttgaccggcttcgttctctctgctacccggataccgatgtctttctggcttgcttcagcgtggtgcagcccagctcctttcaaaacataacagaaaaatggctgccggagatccgcactcacaacccccaagcacctgtgttgctggtgggcactcaggccgacctgagggacgatgtcaatgtactaattcagttggaccaaggaggtcgggagggcccagtacccgaaccccaagcccagggtttggctgagaagatccgggcctgctgctaccttgagtgctcagccttgacgcagaagaacttgaaggaggtgttcgactcggccattctcagtgcgattgagcacaaagcccgcctggagaagaaactgaacgcaaaaggtgtgcgcacgctctctcgctgtcgctggaagaagttcttctgctttgtttgagcagctatggcagtgcaagagataggcaggtggcctgagacttctggaccctgagacatcgggtactggcagggcctggccaacccctgggactcagttctctattgaacacaggggatatgggcctcaaagctgtacactctggtaagccagggtgtgcctctgtcctgtgcaagggctggctgatttggatttctttggtcaagactcacagggaaatcccagcactttggttttcatgggatagttccatcagtgtcagtagcgctgagcagcttgtgatgtaattctcagtttcttatcctgggccacaggtcagtttggctgaatgccaggtccctcgctgggtcctcaccctctcctagcacaggtgtgacaaagctaggaaaggaaaacagtgaggcatcctggagggct

SEQ ID NO: 12429 - protein, 236 aa, Rattus norvegicus
  ref <308>: DATABASE ACCESSION NUMBER: SWISS-Prot / AAC69198
  ref <309>: DATABASE ENTRY DATE: 2002-06-01
MPPRELSEAEPPPLPASTPPPRRRSAPPELGIKCVLVGDGAVGKSSLIVSYTCNGYPSRYRPTALDTFSVQVLVDGAPVRIELWDTAGQEDFDRLRSLCYPDTDVFLACFSVVQPSSFQNITEKWLPEIRTHNPQAPVLLVGTQADLRDDVNVLIQLDQGGREGPVPEPQAQGLAEKIRACCYLECSALTQKNLKEVFDSAILSAIEHKARLEKKLNAKGVRTLSRCRWKKFFCFV

SEQ ID NO: 12430 - protein, 258 aa, Homo sapiens
  ref <308>: DATABASE ACCESSION NUMBER: Refseq / NP_067028
  ref <309>: DATABASE ENTRY DATE: 2002-04-26
MPPQQGDPAFPDRCEAPPVPPRRERGGRGGRGPGEPGGRGRAGGAEGRGVKCVLVGDGAVGKTSLVVSYTTNGYPTEYIPTAFDNFSAVVSVDGRPVRLQLCDTAGQDEFDKLRPLCYTNTDIFLLCFSVVSPSSFQNVSEKWVPEIRCHCPKAPIILVGTQSDLREDVKVLIELDKCKEKPVPEEAAKLCAEEIKAASYIECSALTQKNLKEVFDAAIVAGIQYSDTQQQPKKSKSRTPDKMKNLSKSWWKKYCCFV

SEQ ID NO: 12431 - DNA, 631 bp, Rattus norvegicus
  ref <308>: DATABASE ACCESSION NUMBER: EMBL / AF104399
  ref <309>: DATABASE ENTRY DATE: 1998-12-29
actagtgatttaggatccaatgccaactatgtcgaggcctgcactggatgtcaagggtggtaccacctctggaaaggaagatgccaaccaggagatgaactctctggcctactctaacctcggggtaaaagatcgcagggcagtgaccgtcctgcactaccccggggtcaccgcaaatggagccaaagccaatggagtgcccactagcccctctggatcatcatctccaacaggctctcctactgccaccccttctaccaaacccccatccttcaacctgcaccccacccctcacctgctggccagtatgcagcttcagaagcttaatagccagtaccaaggggctgcagcgactgctgctgctgccctggctgcaccaagccaaccaggagaggatgagcccctgctaaactggggcactgggatccaggcaggagcagggggatcacccggatcagtctctcctgctggtgcccagagccctgctatcattgattctgacccagtggatgaggaggtgctgatgtctctggtggtagaattggggctagaccgagccaatgagcttcccgagctgtggctagggcagaatgagtttgatttcactgcagattttccctctggctgctga

SEQ ID NO: 12432 - protein, 203 aa, Rattus norvegicus
  ref <308>: DATABASE ACCESSION NUMBER: SWISS-Prot / AAC98389
  ref <309>: DATABASE ENTRY DATE: 2000-05-01
MPTMSRPALDVKGGTTSGKEDANQEMNSLAYSNLGVKDRRAVTVLHYPGVTANGAKANGVPTSPSGSSSPTGSPTATPSTKPPSFNLHPTPHLLASMQLQKLNSQYQGAAATAAAALAAPSQPGEDEPLLNWGTGIQAGAGGSPGSVSPAGAQSPAIIDSDPVDEEVLMSLVVELGLDRANELPELWLGQNEFDFTADFPSGC

SEQ ID NO: 12433 - DNA, 1203 bp, Homo sapiens
  ref <308>: DATABASE ACCESSION NUMBER: Refseq / NM_004143
  ref <309>: DATABASE ENTRY DATE: 2002-04-10
gtggaaattgaggggagaaaaaaaaagggaaaaaaagggtctgtccttcctgggattcctagccgaggccagtctgctgccgtgtgcgtgtgcgtcagggctctccgggcggcaatgggggcttgagagccgggtccccagcgccgggaagggagcgcggtggccgccaccgccaccgccccggagtccggcgccgaagctgcgggcgggcgggcgggcaccagctcggtcaggggctgcttggcgcggcactgtgcggtgcagcggcggcgcggcgcggtgcgggcttttcccaggcgccccggggtcgggtggccaacggcgcggccgcgggcgctgagcgcgaccggttcgcggtagcggtggcggcggcgtgcgtgccaggggctgggggctccgccgcctctcttgcggctcaccgagctccgcgcttccctctctccagggcaggcggcttctcagagcacaacagctccagctggcagcatcacttcccgccaatttatccaacttctgccaaggctctgaaatgccaacaacgtcgaggcctgcacttgatgtcaagggtggcacctcacctgcgaaggaggatgccaaccaagagatgagctccgtggcctactccaaccttgcggtgaaagatcgcaaagcagtggccattctgcactaccctggggtagcctcaaatggaaccaaggccagtggggctcccactagttcctcgggatctccaataggctctcctacaaccacccctcccactaaacccccatccttcaacctgcaccccgcccctcacttgctggctagtatgcagctgcagaaacttaatagccagtatcaggggatggctgctgccactccaggccaacccggggaggcaggacccctgcaaaactgggactttggggcccaggcgggaggggcagaatcactctctccttctgctggtgcccagagccctgctatcatcgattcggacccagtggatgaggaagtgctgatgtcgctggtggtggaactggggttggaccgagccaatgagcttccggagctgtggctggggcagaatgagtttgacttcactgcggactttccatctagctgctaatgccaagtgtccctaaagatggaggaataaagccaccaattctgttgtaaataaaaataaagttacttacaaaaaaaaaaaaaaaaaaaaaa

SEQ ID NO: 12434 - protein, 193 aa, Homo sapiens
  ref <308>: DATABASE ACCESSION NUMBER: Refseq / NP_004134
  ref <309>: DATABASE ENTRY DATE: 2002-04-10
MPTTSRPALDVKGGTSPAKEDANQEMSSVAYSNLAVKDRKAVAILHYPGVASNGTKASGAPTSSSGSPIGSPTTTPPTKPPSFNLHPAPHLLASMQLQKLNSQYQGMAAATPGQPGEAGPLQNWDFGAQAGGAESLSPSAGAQSPAIIDSDPVDEEVLMSLVVELGLDRANELPELWLGQNEFDFTADFPSSC

SEQ ID NO: 12435 - DNA, 631 bp, Rattus norvegicus; identical to SEQ ID NO: 12431
  ref <308>: DATABASE ACCESSION NUMBER: EMBL / AF104399
  ref <309>: DATABASE ENTRY DATE: 1998-12-29

SEQ ID NO: 12436 - protein, 203 aa, Rattus norvegicus; identical to SEQ ID NO: 12432
  ref <308>: DATABASE ACCESSION NUMBER: SWISS-Prot / AAC98389
  ref <309>: DATABASE ENTRY DATE: 2000-05-01

SEQ ID NO: 12437 - DNA, 1203 bp, Homo sapiens; identical to SEQ ID NO: 12433
  ref <308>: DATABASE ACCESSION NUMBER: Refseq / NM_004143
  ref <309>: DATABASE ENTRY DATE: 2002-04-10

SEQ ID NO: 12438 - protein, 193 aa, Homo sapiens; identical to SEQ ID NO: 12434
  ref <308>: DATABASE ACCESSION NUMBER: Refseq / NP_004134
  ref <309>: DATABASE ENTRY DATE: 2002-04-10

SEQ ID NO: 12439 - DNA, 1282 bp, Rattus norvegicus; identical to SEQ ID NO: 1368
  ref <308>: DATABASE ACCESSION NUMBER: EMBL / AJ005046
  ref <309>: DATABASE ENTRY DATE: 1998-11-02

SEQ ID NO: 12440 - protein, 339 aa, Rattus norvegicus; identical to SEQ ID NO: 1369
  ref <308>: DATABASE ACCESSION NUMBER: SWISS-Prot / CAA06313
  ref <309>: DATABASE ENTRY DATE: 2001-12-01

SEQ ID NO: 12441 - DNA, 1332 bp, Homo sapiens; identical to SEQ ID NO: 1370
  ref <308>: DATABASE ACCESSION NUMBER: Refseq / NM_003837
  ref <309>: DATABASE ENTRY DATE: 2002-11-05

SEQ ID NO: 12442 - protein, 339 aa, Homo sapiens; identical to SEQ ID NO: 1371
  ref <308>: DATABASE ACCESSION NUMBER: Refseq / NP_003828
  ref <309>: DATABASE ENTRY DATE: 2002-11-05

SEQ ID NO: 12443 - DNA, 601 bp, Rattus norvegicus
  ref <308>: DATABASE ACCESSION NUMBER: EMBL / AJ011115
  ref <309>: DATABASE ENTRY DATE: 1998-09-29
cgctaccagcctgatccatggaaaggaagtgcagcaaaaggcacaggcatcaccaggaagaagacttttaaggaagtagccaatgcagtgaagatctctgcctcactcatgggcacggtgatggcgaagcgtgtgaaggcgactatcctgtatggctctgagactggccgcgcccagagctacgcacagcagctggggaggctctttcggaaggcgtttgacccccgggtcctgtgcatggatgaatacgatgtggtatccctagagcatgaggccttggtattggtggtgaccagcacatttggcaatggggatcccccggagaatggagagagctttgcagcagcgctgatggaaatgtcgggcccctacaacagttcccttcggcctgagcagcacaagagttacaaaatccgattcaacagtgtctcctgctcggacccactggtatcctcttggcggcgcaaaaggaaggaatccagtaacacagacagtgcaggggccctgggcaccctcaggttctgtgtgtttgggctgggctccagagcatacccgcacttctgtgcctttgctcgagcggtggacacaaggctggaggaat

SEQ ID NO: 12444 - protein, 919 aa, Rattus norvegicus
  ref <308>: DATABASE ACCESSION NUMBER: SWISS-Prot / CAA09493
  ref <309>: DATABASE ENTRY DATE: 2000-05-30
GNLKSVGQEPGPPCGLGLGLGLGLCGKQGPASPAPEPSQAPVPPSPTRPAPDHSPPLTRPPDGPKFPRVKNWEVGSITYDTLSAQAQQDGPCTPRRCLGSLVFPRKLQSRPTQGPSPTEQLLGQARDFINQYYNSIKRSGSQAHEQRLQEVEAEVVATGTYQLRESELVFGAKQAWRNAPRCVGRIQWGKLQVFDARDCRTAQEMFTYICNHIKYATNRGNLRSAITVFPPSYAGRGDFRIWNSQLVSYAGYRQQDGSVRGDPANVEITELCIQHGWTPGNGRFDVLRYQPDPWKGSAAKGTGITRKKTFKEVANAVKISASLMGTVMAKRVKATILYGSETGRAQSYAQQLGRLFRKAFDPRVLCMDEYDVVSLEHEALVLVVTSTFGNGDPPENGESFAAALMEMSGPYNSSLRPEQHKSYKIRFNSVSCSDPLVSSWRRKRKESSNTDSAGALGTLRFCVFGLGSRAYPHFCAFARAVDTRLEELGGERLLQLGQGDELCGQEEAFRGWAQAAFQAACETFCVGEDAKAAARDIFSPKRSWKRQRYRLSTQAESLQLLPRLTHVHRRKMFQATILSVENLQSSKSTRATILVRLDTGSQEGLQYQPGDHIGVCPPNRPGLVEALLSRVEDPPPSTEPVAVEQLEKGSPGGPPPGWVRDPRLPPGTVRQALTYFLEIHLTVAVLAYRTQDGLGPLHYGVCSTWMSQLKAGDPVPCFIRGAPSFRLPPDPNLPCILVGPGTGIAPFRGFWQDRLHDIEIKGLQPAPMTLVFGCRCSQLDHLYRDEVLDAQQRGVFGQVLTAFSRDPGSPKTYVQDLLRTELAAEVHRVLCLEQGHMFVCGDVTMATSVLQTVQRILATEGSMELDEAGDVIGVLRDQQRYHEDIFGLTLRTQEVTSRIRTQSFSLQERQLRGAVPWSF

SEQ ID NO: 12445 - DNA, 601 bp, Rattus norvegicus; identical to SEQ ID NO: 12443
  ref <308>: DATABASE ACCESSION NUMBER: EMBL / AJ011115
  ref <309>: DATABASE ENTRY DATE: 1998-09-29

SEQ ID NO: 12446 - protein, 919 aa, Rattus norvegicus; identical to SEQ ID NO: 12444
  ref <308>: DATABASE ACCESSION NUMBER: SWISS-Prot / CAA09493
  ref <309>: DATABASE ENTRY DATE: 2000-05-30

SEQ ID NO: 12447 - DNA, 1109 bp, Rattus norvegicus; identical to SEQ ID NO: 1535
  ref <308>: DATABASE ACCESSION NUMBER: EMBL / D00569
  ref <309>: DATABASE ENTRY DATE: 2000-02-01

SEQ ID NO: 12448 - protein, 335 aa, Rattus norvegicus; identical to SEQ ID NO: 1536
  ref <308>: DATABASE ACCESSION NUMBER: SWISS-Prot / Q64591
  ref <309>: DATABASE ENTRY DATE: 2000-05-30

SEQ ID NO: 12449 - DNA, 1120 bp, Homo sapiens; identical to SEQ ID NO: 1537
  ref <308>: DATABASE ACCESSION NUMBER: EMBL / L26050
  ref <309>: DATABASE ENTRY DATE: 2000-03-04

SEQ ID NO: 12450 - protein, 335 aa, Homo sapiens; identical to SEQ ID NO: 1538
  ref <308>: DATABASE ACCESSION NUMBER: SWISS-Prot / Q16698
  ref <309>: DATABASE ENTRY DATE: 2001-10-16

SEQ ID NO: 12451 - DNA, 1109 bp, Rattus norvegicus; identical to SEQ ID NO: 1535
  ref <308>: DATABASE ACCESSION NUMBER: EMBL / D00569
  ref <309>: DATABASE ENTRY DATE: 2000-02-01

SEQ ID NO: 12452 - protein, 335 aa, Rattus norvegicus; identical to SEQ ID NO: 1536
  ref <308>: DATABASE ACCESSION NUMBER: SWISS-Prot / Q64591
  ref <309>: DATABASE ENTRY DATE: 2000-05-30

SEQ ID NO: 12453 - DNA, 1120 bp, Homo sapiens; identical to SEQ ID NO: 1537
  ref <308>: DATABASE ACCESSION NUMBER: EMBL / L26050
  ref <309>: DATABASE ENTRY DATE: 2000-03-04

SEQ ID NO: 12454 - protein, 335 aa, Homo sapiens; identical to SEQ ID NO: 1538
  ref <308>: DATABASE ACCESSION NUMBER: SWISS-Prot / Q16698
  ref <309>: DATABASE ENTRY DATE: 2001-10-16

SEQ ID NO: 12455 - DNA, 1109 bp, Rattus norvegicus; identical to SEQ ID NO: 1535
  ref <308>: DATABASE ACCESSION NUMBER: EMBL / D00569
  ref <309>: DATABASE ENTRY DATE: 2000-02-01

SEQ ID NO: 12456 - protein, 335 aa, Rattus norvegicus; identical to SEQ ID NO: 1536
  ref <308>: DATABASE ACCESSION NUMBER: SWISS-Prot / Q64591
  ref <309>: DATABASE ENTRY DATE: 2000-05-30

SEQ ID NO: 12457 - DNA, 1120 bp, Homo sapiens; identical to SEQ ID NO: 1537
  ref <308>: DATABASE ACCESSION NUMBER: EMBL / L26050
  ref <309>: DATABASE ENTRY DATE: 2000-03-04

SEQ ID NO: 12458 - protein, 335 aa, Homo sapiens; identical to SEQ ID NO: 1538
  ref <308>: DATABASE ACCESSION NUMBER: SWISS-Prot / Q16698
  ref <309>: DATABASE ENTRY DATE: 2001-10-16

SEQ ID NO: 12459 - DNA, 1083 bp, Rattus norvegicus; identical to SEQ ID NO: 1559
  ref <308>: DATABASE ACCESSION NUMBER: EMBL / D00729
  ref <309>: DATABASE ENTRY DATE: 2000-02-01

SEQ ID NO: 12460 - protein, 298 aa, Rattus norvegicus; identical to SEQ ID NO: 1560
  ref <308>: DATABASE ACCESSION NUMBER: SWISS-Prot / BAA00629
  ref <309>: DATABASE ENTRY DATE: 2002-03-01

SEQ ID NO: 12461 - DNA, 1024 bp, Homo sapiens
  ref <308>: DATABASE ACCESSION NUMBER: Refseq / XM_028848
  ref <309>: DATABASE ENTRY DATE: 2002-08-01
agcccgcgacctttatcccgcgcgttgcggtcaagatggcgctggtggcttctgttgcgagtccggcgcgcgttctgctccgcgcgggggcccggctcccgggcgcggccctcgggcggacggagcgggcggccggcggcggagacggcgcgcggcgcttcgggagccagcgggtgctggtggagccggacgcgggcgcaggggtcgctgtgatgaaattcaagaaccccccagtgaacagcctgagcctggagtttctgacggagctggtcatcagcctggagaagctggagaatgacaagagcttccgcggtgtcattctgacctcggaccgcccgggtgtcttctcggccggcctggacctgacggagatgtgtgggaggagccccgcccactacgctgggtactggaaggccgttcaggagctgtggctgcggttgtaccagtccaacctggtgctggtctccgccatcaacggagcctgccccgctggaggctgcctggtggccctgacctgtgactaccgcatcctggcggacaaccccaggtactgcataggactcaatgagacccagctgggcatcatcgcccctttctggttgaaagacaccctggagaacaccatcgggcaccgggcggcggagcgtgccctgcagctggggctgctcttcccgccggcggaggccctgcaggtgggcatagtggaccaggtggtcccggaggagcaggtgcagagcactgcgctgtcagcgatagcccagtggatggccattccagaccatgctcgacagctgaccaaggccatgatgcgaaaggccacggccagccgcctggtcacgcagcgcgatgcggacgtgcagaacttcgtcagcttcatctccaaagactccatccagaagtccctgcagatgtacttagagaggctcaaagaagaaaaaggctaacgattgggctgccacaggcttacggccacacgtgcccctgtgggtcccagggaggtcttaaacaaggtatttttcaactt

SEQ ID NO: 12462 - protein, 302 aa, Homo sapiens
  ref <308>: DATABASE ACCESSION NUMBER: Refseq / XP_028848
  ref <309>: DATABASE ENTRY DATE: 2002-08-01
MALVASVASPARVLLRAGARLPGAALGRTERAAGGGDGARRFGSQRVLVEPDAGAGVAVMKFKNPPVNSLSLEFLTELVISLEKLENDKSFRGVILTSDRPGVFSAGLDLTEMCGRSPAHYAGYWKAVQELWLRLYQSNLVLVSAINGACPAGGCLVALTCDYRILADNPRYCIGLNETQLGIIAPFWLKDTLENTIGHRAAERALQLGLLFPPAEALQVGIVDQVVPEEQVQSTALSAIAQWMAIPDHARQLTKAMMRKATASRLVTQRDADVQNFVSFISKDSIQKSLQMYLERLKEEKG

SEQ ID NO: 12463 - DNA, 1083 bp, Rattus norvegicus; identical to SEQ ID NO: 1559
  ref <308>: DATABASE ACCESSION NUMBER: EMBL / D00729
  ref <309>: DATABASE ENTRY DATE: 2000-02-01

SEQ ID NO: 12464 - protein, 298 aa, Rattus norvegicus; identical to SEQ ID NO: 1560
  ref <308>: DATABASE ACCESSION NUMBER: SWISS-Prot / BAA00629
  ref <309>: DATABASE ENTRY DATE: 2002-03-01

SEQ ID NO: 12465 - DNA, 1024 bp, Homo sapiens; identical to SEQ ID NO: 12461
  ref <308>: DATABASE ACCESSION NUMBER: Refseq / XM_028848
  ref <309>: DATABASE ENTRY DATE: 2002-08-01

SEQ ID NO: 12466 - protein, 302 aa, Homo sapiens; identical to SEQ ID NO: 12462
  ref <308>: DATABASE ACCESSION NUMBER: Refseq / XP_028848
  ref <309>: DATABASE ENTRY DATE: 2002-08-01

SEQ ID NO: 12467 - DNA, 1258 bp, Rattus norvegicus
  ref <308>: DATABASE ACCESSION NUMBER: EMBL / D10026
  ref <309>: DATABASE ENTRY DATE: 1998-07-20
gggggaacgcgtcagacttggccaactgaggctgggctggacccctattgtggaatcgcggacacttcctacagttgtcgaacgcaatccgtctacaccaccttgtgtcactacctaccaccatgggtttggagctctacctggacctgctgtcgcagcccagccgcgcggtctacatcttcgccaagaagaatggcattccctttcagttgcgtaccgtggatttactcaaagggcagcacttgagcgagcaattctcccaggtgaactgcttaaagaaagtgcctgtcctcaaagacggaagcttcgtgttgaccgaaagcactgccatcttgatttacctgagttccaagtaccaggtggcagaccactggtacccggccgacctacaggcccgtgcccaagtccacgaatacctgggttggcatgccgacaacatccgtggcacctttggagtactcctgtggaccaaggtgttggggccactcattggggtccaggttcccgaggaaaaggtggaacggaacagaaatagtatggtcttggctctgcaacgtctggaggacaagttcctcagggacagggccttcattgctggccagcaggtgacgctagcggatctcatgtctctagaggagttgatacagccggtggctcttggctgtaatctgtttgaggggcggcctcaactgacagcgtggcgagagagggtggaggcgttcttgggtgctgagctatgtcaggaggcgcacaaccccatcatgagcgtcctgggacaggcagccaagaaaacattaccagtaccccctccggaggcccatgccagcatgatgcttcgaattgccaggattccctgagtggttttttttccctgagtatttttattgctataaagactcattttgtattttgcctctttgttttgttttgtttttgtttcttcttgtcccaacctttttttttttttttttttttctggctccttttctggctctgggaggagctttgctcaaaagggacaccacctatccttagcatgcttctcttgaggtacagtatgcacaaccaataggagacccaagtcaataatatataaaaggtgcttaaaaaaaaaaaagcaaacagtaacacacacgaagaaatcaaccaaaaattggtggacatctgttttttattataatatagattctgaatattttaaggaataaagagttattgttttattacattgccctctaatctgtatggaataaattat

SEQ ID NO: 12468 - protein, 243 aa, Rattus norvegicus
  ref <308>: DATABASE ACCESSION NUMBER: SWISS-Prot / BAA00916
  ref <309>: DATABASE ENTRY DATE: 1998-07-15
GLELYLDLLSQPSRAVYIFAKKNGIPFQLRTVDLLKGQHLSEQFSQVNCLKKVPVLKDGSFVLTESTAILIYLSSKYQVADHWYPADLQARAQVHEYLGWHADNIRGTFGVLLWTKVLGPLIGVQVPEEKVERNRNSMVLALQRLEDKFLRDRAFIAGQQVTLADLMSLEELIQPVALGCNLFEGRPQLTAWRERVEAFLGAELCQEAHNPIMSVLGQAAKKTLPVPPPEAHASMMLRIARIP

SEQ ID NO: 12469 - DNA, 1100 bp, Homo sapiens
  ref <308>: DATABASE ACCESSION NUMBER: Refseq / NM_000854
  ref <309>: DATABASE ENTRY DATE: 2002-11-05
cagctgctgcccacaccgcgtcgacgccttcactgccatccccgctgtccttgccgcccccgccatgggcctagagctgtttcttgacctggtgtcccagcccagccgcgccgtctacatcttcgccaagaagaatggcatccccttagagctgcgcaccgtggatttggtcaaagggcagcacaagagcaaggagttcttgcagatcaacagcctggggaaactgccgacgctcaaggatggtgatttcatcttgaccgaaagctcggccatcctgatttacctgagctgtaagtaccagacgccggaccactggtatccatctgacctgcaggctcgtgcccgtgttcatgagtacctgggctggcatgccgactgcatccgtggcacctttggtatacccctgtgggtccaggtgttggggccactcattggggtccaggtgcccgaggagaaggtggaacgcaacaggactgccatggaccaggccctgcaatggctggaggacaagttcctgggggacaggcccttcctcgctggccagcaggtgacactggctgatctcatggccctggaggagctgatgcagccggtggctctcggctacgaactgtttgagggacggccacgactggcagcatggcgtggacgagtggaggctttcctgggtgctgagctatgccaggaggcccacagcatcatcttgagcatcctggaacaggcggccaagaaaaccctcccaacaccctcaccagaggcctatcaggctatgctgcttcgaatcgccaggatcccctgaagggtctgggatgggggccaggagattagcaacaaggattcattctgttacttacttgcccctttttatctttccctcttgccccagtcccttctctccagcttcatgtgaagctctgcacagacaagacactcagtgtccttggcagtgctgctactcctcaggtgcagcatacataaccagtaagagactaaatctgcaatatataaagagctcctacaaatcagtaacatgaagaacactcaaaaattggcaaatgtcatcagtgttttaaacagaataaagattccaaacactttga

SEQ ID NO: 12470 - protein, 244 aa, Homo sapiens
  ref <308>: DATABASE ACCESSION NUMBER: Refseq / NP_000845
  ref <309>: DATABASE ENTRY DATE: 2002-11-05
MGLELFLDLVSQPSRAVYIFAKKNGIPLELRTVDLVKGQHKSKEFLQINSLGKLPTLKDGDFILTESSAILIYLSCKYQTPDHWYPSDLQARARVHEYLGWHADCIRGTFGIPLWVQVLGPLIGVQVPEEKVERNRTAMDQALQWLEDKFLGDRPFLAGQQVTLADLMALEELMQPVALGYELFEGRPRLAAWRGRVEAFLGAELCQEAHSIILSILEQAAKKTLPTPSPEAYQAMLLRIARIP

SEQ ID NO: 12471 - DNA, 1222 bp, Rattus norvegicus
  ref <308>: DATABASE ACCESSION NUMBER: EMBL / D12820
  ref <309>: DATABASE ENTRY DATE: 2000-06-03
agggtcattttgtgatatgtccggtgctattatttggaaactaaacttaaattttctttaacagatacaaaagtcatatggaaacagagaaccacacaatgagaacagaatttcacatcctgggtctctcagatgatcctgaactgcaacccattctctggactgttcctgtccatgtatctggtcacagtgcttgggaacttgctcatcatcctggctgtcagctctaattcacatctccacaacctcatgtatttcttcctctccaatctgtcctttgttgacatctgtttcatctcaaccacaataccaaaaatgctagtgaacatacattcacagacaaaagacatctcctacatagaatgcctttcacaggtatattttttaactacttttggtggaatggataattttttactcactttaatggcctgtgatcgctatgtagccatctgccaccccctcaactacactgtaatcatgaaccttcagctgtgtgcccttctgattctgatgttttggttaatcatgttctgtgtctccctgattcatgttctattgatgaatgaattgaacttctccagaggcacagaaattccacatttcttctgtgaactggctcaagttcttaaggtagccaattctgacactcatatcaataatgtcttcatgtatgtggtgacttccctactaggactgatccctatgacaggaatacttatgtcttactcacagattgcttcatccttattaaagatgtcttcctctgtgagtaagtacaaggccttttccacctgtggatctcacctctgtgtggtctctttattctatgggtcagcaactatagtttacttctgctcttctgtgctccattctacacacaagaaaatgattgcttcattgatgtacactgtaatcagccccatgctgaacccctttatctatagcctgagaaacaaggatgtaaagggtgcccttggaaaacttttcatccgagttgcctcttgcccattgtggagcaaagactttagacctaaattcatactaaaacctgaaaggcaaagtttataaacaaacctctcctgggtcatttgtatcataaaatatatgcctaatttacactattctaaaagtatatatagcttgtcatttgtgtactttctacaaaaaatattttaattccctatgcatattgtttaaaatttgcaattcttgttatgtc

SEQ ID NO: 12472 - protein, 312 aa, Rattus norvegicus
  ref <308>: DATABASE ACCESSION NUMBER: SWISS-Prot / BAA02252
  ref <309>: DATABASE ENTRY DATE: 1994-02-01
MILNCNPFSGLFLSMYLVTVLGNLLIILAVSSNSHLHNLMYFFLSNLSFVDICFISTTIPKMLVNIHSQTKDISYIECLSQVYFLTTFGGMDNFLLTLMACDRYVAICHPLNYTVIMNLQLCALLILMFWLIMFCVSLIHVLLMNELNFSRGTEIPHFFCELAQVLKVANSDTHINNVFMYVVTSLLGLIPMTGILMSYSQIASSLLKMSSSVSKYKAFSTCGSHLCVVSLFYGSATIVYFCSSVLHSTHKKMIASLMYTVISPMLNPFIYSLRNKDVKGALGKLFIRVASCPLWSKDFRPKFILKPERQSL

SEQ ID NO: 12473 - DNA, 960 bp, Homo sapiens; identical to SEQ ID NO: 3830
  ref <308>: DATABASE ACCESSION NUMBER: Refseq / NM_012377
  ref <309>: DATABASE ENTRY DATE: 2001-04-14

SEQ ID NO: 12474 - protein, 319 aa, Homo sapiens
  ref <308>: DATABASE ACCESSION NUMBER: Refseq / NP_036509
  ref <309>: DATABASE ENTRY DATE: 2001-04-14
MERGNQTEVGNFLLLGFAEDSDMQLLLHGLFLSMYLVTIIGNLLIILTISSDSHLHTPMYFFLSNLSFADICFTSTTVPKMLVNIQTQSKMITFAGCLTQIFFFIAFGCLDNLLLTMTAYDRFVAICYPLHYTVIMNPRLCGLLVLGSWCISVMGSLLETLTILRLSFCTNMEIPHFFCDPSEVLKLACSDTFINNIVMYFVTIVLGVFPLCGILFSYSQIFSSVLRVSARGQHKAFSTCGSHLSVVSLFYGTGLGVYLSSAVTPPSRTSLAASVMYTMVTPMLNPFIYSLRNKDMKGSLGRLLLRATSLKEGTIAKLS

SEQ ID NO: 12475 - DNA, 1338 bp, Rattus norvegicus
  ref <308>: DATABASE ACCESSION NUMBER: EMBL / D13556
  ref <309>: DATABASE ENTRY DATE: 2000-04-14
aagctttggaattactgaggttagactaatgcaagtgctgggtaatcgtacttatacacaagtctaaggttctgcaggaaagaaattgtctttggtatctgcatcaggctagtattattaacatttggattttgctttgggatagagcttgtatgaccctagaaccaaacccccctccccaatcaactgagattaaaaagatccatgtaaaaatttccttcatttgcaacccccaacccacccgccccggataaaaagtcacaggcatctacctagcacaaaggttacgaaatacaatgcatagtcgacagtggtgctgcaaaaggaaacaaaactagaaacaagataaagacaaatctgatcattgttctgcatgtttcctcacaaacaggacagccacttccaagcagttctggtaacagaaaagagaaagaaggctcagaagggcccttgggttgagaccccgccccaaaggtgaaagcacccagcagagtagccaatcctgtgccagcatcttcagcttcccactctgtggagtccatggccacaccgtagcagtgcccagctctaaggccctgcgctaagctctggtgctctggtggtgaccctggctgctgtcataaagtctgtggtggtgatgggattttggcttttgttttgaaaaatctgatgttcccatttccttgatgcatgctctgcttacaagtcagtcagcaagggtcaaagctcccgagcgtgcatctgaatgaatccctcaacttagaaaaagacttgctgcccttctgagctggccagaggtgtcgacacctacccttggcatgcctccaagtgccaggatgccacagactggattgaggctgaagacttcccttttctttggtttttttgtttgttttgagtttatacaagcattaagaaatctttggttttggctggaaatggaaaaacaaaacaaagaaaccaccctcccctggcttatagcagcagtataatgacctgacttggctaagctttttcttcccccaactttggggttgggaactgcaagttaagaactacattcaaagaaaatgttgaaagggctggagaagcagcttccagaaagcccgtcggatataagattgtcaaataataattattattacaatattaataataaacttaaatatttggaaattttttggtcatgtcacacaggaaacaagtgaaatgtgtagcttaagtcagtgtaaatgaacctttggtgtcctttctaccaagtcctggcaatgagcagaatcccatggcctcaggggggaacggcgagtcagaagctgatggatagccagcagttagaaa

SEQ ID NO: 12476 - DNA, 1410 bp, Rattus norvegicus
  ref <308>: DATABASE ACCESSION NUMBER: EMBL / D13966
  ref <309>: DATABASE ENTRY DATE: 2000-02-01
atggcagtgcctgctctgtggccctggggagtatacttgcttatgagcctgctgtccttgggatcttgcctggacacactggaggtgtgccccagtcttgacatccgctcggaggtgacagagctccgtcggctggagaactgcagtgtggtggagggtcacctacagatcctcctcatgtttgccgccacgggagaggacttccgaggcctcagctttcctcgcctcacccaggtgactgactacctgctgctgttccgagtctatggcctagagagccttcgagacctcttccccaaccttgctgtgatccgaggtgcgcgcctcttcctgggctatgcacttataatcttcgagatgccccacttgagggacattgggctgccgtcacttggggccgtgctgcgtggggccgttcgtgtggagaagaaccaggaactttgccatctctccaccattgactggggcctgctgcagcctgcacctggtgccaaccacattgttgggaacaagctgggtgaggagtgtgctgacgtgtgccctggtgtgctgggggctgctggtgagccctgtgtgagaaccaccttcggtgggcacaccgactacaggtgttggacctccagccactgtcagagagtgtgtccctgcccccgtgggctggcctgcacagtaggtggcgagtgctgccacagtgaatgtctcgggggctgcagtcagcctgaagaccctcgagcctgcgtagcttgccgccacctctacttccaaggagtctgcctccccgcctgccctccgggcacctaccagtatgagtcttggcggtgtgtcactgcggagctctgtggccatctgcgagaggttcctggacatgccaccgcctttggcatctacgagggcagctgcctagctcagtgccctccaggcttcacccgtaatggcagcagcattttctgccataagtgtgagggcctgtgccccaaagagtgcaaggttgggacaaagaccatcgactctgtccaagccacacaggacctagtgggctgcacccatgtggaggggagcctcatcctcaaccttcgacaaggctgtcagtattcttcctggtcacgcccttggccacgccctccgtggtcacaccctccctcccttgcatggttccccctcatccctccgttcctacctcctcgtttgtccctccagctcccttccctgtggacccatcaccttccctgggctgctccactcctatctttctcatccccagacaatctggagccagagcttcaacgcaacctggggctggtggagaccatcaccggcttcctcaaaatcaagcactcttttgcactcgtgaccctgggatttttcaagaacctcaaactaatccggggagattccatggtggatgggtaa

SEQ ID NO: 12477 - protein, 469 aa, Rattus norvegicus
  ref <308>: DATABASE ACCESSION NUMBER: SWISS-Prot / BAA03069
  ref <309>: DATABASE ENTRY DATE: 2003-02-01
MAVPALWPWGVYLLMSLLSLGSCLDTLEVCPSLDIRSEVTELRRLENCSVVEGHLQILLMFAATGEDFRGLSFPRLTQVTDYLLLFRVYGLESLRDLFPNLAVIRGARLFLGYALIIFEMPHLRDIGLPSLGAVLRGAVRVEKNQELCHLSTIDWGLLQPAPGANHIVGNKLGEECADVCPGVLGAAGEPCVRTTFGGHTDYRCWTSSHCQRVCPCPRGLACTVGGECCHSECLGGCSQPEDPRACVACRHLYFQGVCLPACPPGTYQYESWRCVTAELCGHLREVPGHATAFGIYEGSCLAQCPPGFTRNGSSIFCHKCEGLCPKECKVGTKTIDSVQATQDLVGCTHVEGSLILNLRQGCQYSSWSRPWPRPPWSHPPSLAWFPLIPPFLPPRLSLQLPSLWTHHLPWAAPLLSFSSPDNLEPELQRNLGLVETITGFLKIKHSFALVTLGFFKNLKLIRGDSMVDG

SEQ ID NO: 12478 - DNA, 3808 bp, Homo sapiens
  ref <308>: DATABASE ACCESSION NUMBER: Refseq / XM_043563
  ref <309>: DATABASE ENTRY DATE: 2002-08-01
tgtgccccagcctggatattcgctcagaggtggcagagcttcgtcagctggagaactgcagcgtggtggagggccacctgcagatcctgctcatgttcacagccaccggggaggacttccgcggcctcagcttccctcgcctcacccaggtcaccgactacctgctgctcttccgtgtctacggactggagagcctgcgcgacctcttccccaacctagcagtcatccgcgggacgcgcctcttcctgggctatgcactggtcatctttgagatgccacatctgcgtgacgtggcactgcctgcacttggggccgtgctgcgtggggctgtgcgtgtggagaagaaccaggagctctgccacctctccaccattgactggggactgctgcagccagcacctggcgccaaccacatcgtgggcaacaagctgggcgaggagtgtgctgacgtgtgccctggtgtgctgggtgctgctggtgagccctgtgccaagaccaccttcagcgggcacactgactacagatgctggacctccagccactgccagagagtgtgcccctgcccccatgggatggcttgcacagcgaggggcgagtgctgccacaccgaatgcctggggggctgcagccagccagaagaccctcgtgcctgtgtagcttgccgccacctctacttccagggtgcctgcctgtgggcctgcccgccaggcacctaccagtatgagtcctggcgctgtgtcacagctgagcgctgtgccagcctgcactctgtgcccggccgtgcctccaccttcggcatacaccagggcagttgcctggcccagtgcccttctggcttcacccgtaatagcagcagcatattctgccacaagtgcgaggggctgtgccctaaagagtgcaaggtaggcaccaagaccatcgactccatccaggcggcacaggatcttgtgggctgcacgcatgtggagggaagcctcatcctcaaccttcgccagggctacaacctggagccacagctgcagcacagcctggggctggtagaaaccattactggcttcctcaaaatcaagcactcctttgccctcgtgtccctgggctttttcaagaacctcaaactaatccggggagacgccatggtggatgggaactacactctctacgtgctggacaaccagaacctacaacagctagggtcctgggtggccgcggggctcaccattcccgtgggcaagatctacttcgccttcaacccgcgcctctgcttggaacacatctaccgactggaggaggtgacaggcacgcgaggtcggcagaacaaggctgagatcaacccccgcaccaacggagaccgcgccgcctgccagactcgcaccctgcgcttcgtgtccaacgtgacggaggcagaccgcatcctgctacgctgggagcgctatgagccactggaggcccgcgacctgctcagcttcatcgtgtactacaaggagtccccattccagaacgccacagagcacgtgggtccagatgcttgtggaacccagagctggaacctgctggatgtggagctgcccctaagccgcacccaggagccaggggtgaccctagcctccctcaagccttggacacagtacgcagtgtttgtgcgggccatcacgctaaccactgaggaggacagccctcatcaaggagcccagagtcccatcgtctacctccgaacgctgcctgcagctcccacggtgccccaagacgtcatctccacgtccaactcctcctcccacctcctggtgcgctggaagccaccgacccagcgcaatgggaacctcacctactacctggtgctgtggcagcggctggcagaggacggcgacctctacctcaatgactactgccaccgcggcttgcggctgcccaccagcaacaacgatccgcgcttcgacggcgaagacggggatcctgaggccgagatggagtccgactgctgcccttgccagcacccacctcctggtcaggttctgcccccgctggaggcgcaagaggcctcgttccagaagaagtttgaaaactttctacacaacgcgatcaccatccccatatccccttggaaggtgacgtccatcaacaagagcccccaaagggactcagggcggcaccgccgggcagctgggcccctccggctggggggcaacagctcggatttcgagatccaggaggacaaggtgccccgtgagcgagcggtgctgagcggcctgcgccacttcacggaataccggatcgacatccatgcctgcaaccacgcggcgcacaccgtgggctgcagcgccgccaccttcgtctttgcgcgcaccatgccccacagagaggctgatggtattccaggaaaggtggcctgggaggcctccagcaagaacagtgtccttctgcgctggctcgagccaccagaccccaacggactcatcctcaagtacgaaatcaagtaccgccgcttgggagaggaggccacagtgctgtgtgtgtcccgtcttcgatatgcgaagtttgggggagtccacctggccctgctgccccctggaaactactctgccagggttagggcaacctcactggctggcaatggctcttggacagacagtgttgccttctacatccttggcccagaggaggaggatgctggggggctgcatgtcctcctcactgccacccctgtggggctcacgctgctcatcgttcttgctgcccttggtttcttctacggcaagaagagaaacagaaccctgtatgcttctgtgaatccagagtacttcagcgcctctgatagtaggtccctgatgaatgggaggtgcctcgggagcagatctcgataatccgggaactgggccagggctcttttgggatggtatatgaggggctggcacgaggacttgaggctggagaggagtccacacccgtggccctgaagacggtgaatgagctggccagcccacgggaatgcattgagttcctcaaggaagcttctgtcatgaaagccttcaagtgtcaccatgtggtgcgtctcctgggtgtggtatctcagggccagccaactctggtcatcatggagttaatgacccgtggggacctcaagagccatcttcgatctttgcggcctgaggcagagaacaaccctgggctcccacagccagcattgggggaaatgatccaaatggctggtgagattgcagacggcatggcctaccttgctgccaacaagtttgtgcaccgagatctagcagcccgcaactgcatggtgtcccaggacttcaccgtcaagatcggggacttcgggatgactcgggacgtgtatgagacagactattaccgcaagggtgggaaggggctgctgcccgtgcgctggatggcccccgagtccctcaaagatgggatcttcaccacccactcggatgtctggtcctttggcgtggtactctgggagattgtgaccctggcagaacaaccctaccagggcctgtccaatgagcaggtgctgaagttcgtcatggatggcggggtcctggaggagctggagggctgtccccttcagctgcaggagctgatgagccgctgctggcagccgaacccacgcctgcgcccatctttcacacacattctggacagcatacaggaggagctgcggccctccttccgcctcctctccttctactacagcccggaatgccggggggcccggggctccctgcctaccaccgatgcagagcctgactcctcacccactccaagagactgcagccctcaaaatgggggtccagggcactga

SEQ ID NO: 12479 - protein, 921 aa, Homo sapiens
  ref <308>: DATABASE ACCESSION NUMBER: Refseq / XP_043563
  ref <309>: DATABASE ENTRY DATE: 2002-08-01
MFTATGEDFRGLSFPRLTQVTDYLLLFRVYGLESLRDLFPNLAVIRGTRLFLGYALVIFEMPHLRDVALPALGAVLRGAVRVEKNQELCHLSTIDWGLLQPAPGANHIVGNKLGEECADVCPGVLGAAGEPCAKTTFSGHTDYRCWTSSHCQRVCPCPHGMACTARGECCHTECLGGCSQPEDPRACVACRHLYFQGACLWACPPGTYQYESWRCVTAERCASLHSVPGRASTFGIHQGSCLAQCPSGFTRNSSSIFCHKCEGLCPKECKVGTKTIDSIQAAQDLVGCTHVEGSLILNLRQGYNLEPQLQHSLGLVETITGFLKIKHSFALVSLGFFKNLKLIRGDAMVDGNYTLYVLDNQNLQQLGSWVAAGLTIPVGKIYFAFNPRLCLEHIYRLEEVTGTRGRQNKAEINPRTNGDRAACQTRTLRFVSNVTEADRILLRWERYEPLEARDLLSFIVYYKESPFQNATEHVGPDACGTQSWNLLDVELPLSRTQEPGVTLASLKPWTQYAVFVRAITLTTEEDSPHQGAQSPIVYLRTLPAAPTVPQDVISTSNSSSHLLVRWKPPTQRNGNLTYYLVLWQRLAEDGDLYLNDYCHRGLRLPTSNNDPRFDGEDGDPEAEMESDCCPCQHPPPGQVLPPLEAQEASFQKKFENFLHNAITIPISPWKVTSINKSPQRDSGRHRRAAGPLRLGGNSSDFEIQEDKVPRERAVLSGLRHFTEYRIDIHACNHAAHTVGCSAATFVFARTMPHREADGIPGKVAWEASSKNSVLLRWLEPPDPNGLILKYEIKYRRLGEEATVLCVSRLRYAKFGGVHLALLPPGNYSARVRATSLAGNGSWTDSVAFYILGPEEEDAGGLHVLLTATPVGLTLLIVLAALGFFYGKKRNRTLYASVNPEYFSASDSRSLMNGRCLGSRSR

SEQ ID NO: 12480 - DNA, 456 bp, Rattus norvegicus
  ref <308>: DATABASE ACCESSION NUMBER: EMBL / D14448
  ref <309>: DATABASE ENTRY DATE: 1999-01-21
atgagcgataacgatgacatcgaggtggagagcgacgctgacaaacgggctcaccataatgcactggaacgaaaacgtagggaccacatcaaagacagctttcacagtttgcgggactcagtcccatcactccaaggagagaaggcatcccgggcccaaatcctagacaaagcaacagagtatatccagtatatgcgaaggaaaaaccatacgcaccagcaagacattgatgacctcaagcggcagaatgctcttctggagcaacaagtccgtgcactggagaaggcaagatcaagtgcccaactgcagaccaactacccctcctcagacaacagcctctacaccaacgccaagggcggcaccatctctgccttcgatgggggttcagactccagctcagagtccgagcctgaggagccccagaacaggaagaaactgcggatggaggccagctaa

SEQ ID NO: 12481 - protein, 160 aa, Rattus norvegicus
  ref <308>: DATABASE ACCESSION NUMBER: SWISS-Prot / P52164
  ref <309>: DATABASE ENTRY DATE: 2001-10-16
MSDNDDIEVESDEEQPRFQSAADKRAHHNALERKRRDHIKDSFHSLRDSVPSLQGEKASRAQILDKATEYIQYMRRKNHTHQQDIDDLKRQNALLEQQVRALEKARSSAQLQTNYPSSDNSLYTNAKGGTISAFDGGSDSSSESEPEEPQNRKKLRMEAS

SEQ ID NO: 12482 - DNA, 2641 bp, Rattus norvegicus
  ref <308>: DATABASE ACCESSION NUMBER: EMBL / D14478
  ref <309>: DATABASE ENTRY DATE: 1999-01-21
gccctggaagccctgctttcctgacaccctacaggactcacaggcaggccatggcagctctggcagcgggagtatccaagcaacgtgcagttgctgaggggcttggctctaaccagaatgctgtgaagtatctgggccaggacttcgagaccctgaggaagcagtgcttgaactcgggggtcctatttaaggacccagaatttccagcatgtccatcagctttgggctacaaggatctaggaccaggctccccagacactcaaggcatcgtatggaagcgacccacggaattgtgtcccaaccctcagtttattgttggtggagccacacgcacagacatccgccaagggggtcttgtgtgggcacatgcgtctttgtgattctctgctggagaaacctgaacatgggctgaactgtaggactcccttgatggtccaagagactgctggcttctagcagccattgcctccctcaccttgaatgaaaagctgctttaccgggtgcttcccagggaccagagcttccagaaggactacgcgggcatatttcatttccagttctggcagtatggagagtgggtggaggtggtcattgatgaccggctccccaccaagaacgggcagctgctttttctacactccgaagaaggcaatgagttttggagcgctctgctggagaaagcctatgccaagctaaatggttcatatgaggctcttgttggaggctccacaatcgaggggtttgaggatttcacaggtggcatctctgagttttatgacttgaagaagcctccggaaaatctgtactacatcatccagaaggccctccgcaaaggctctctgctgggctgctccattgatgtctcaactgcagctgaagcagaagccaccaccaggcaaaagctggttaagggtcatgcatactctgttactggagtcgaagaggtgaatttccatggccgtccagagaagctgatcaggttgaggaacccgtggggtgaagtggagtggtcgggagcctggagtgataatgcacctgagtggaattacatagatccaaggaggaaggaggagctggacaagaaagcagaagatggcgagttctggatgtccttttcggatttcttgaagcagtactcccgactggagatctgcaacctgtccccagactctctgagcagtgaagagatacacaaatggaacctagtactcttcaacggccgctggacacggggttctacagccgggggctgcctgaactacccaggcacgtactggaccaacccccagtttaaaatccatttggatgaggtggatgaggaccaggaggagggcaccagtgaaccctgctgtaccgtgctgctgggtctgatgcagaagaatcgaagacgtcaaaagaggatcggccagggcatgctcagcataggctacgctgtctaccagattcccaaggaggttctcagcacgatcaggagtgtaaatagaccagcagggtccagattcatagacttgggcccaggctatgttcccagattgcagactactggtctgtcctgcccttggatcacagatgcacgccacttatcatggaggggacggcccagttggagagtcacacggatgcacaccttggccgggacttcttcctgggacgccagccctctacctgctccagcacttacatgaaccttcgggaggtgtccagcagggtccgactccccccgggacagtacctggtggtgccatccaccttcgagcccttcaaggatggtgacttctgcttgagggtgttctcagagaagaaggccaaggctctggaaattggggatactgtatctggacaccctcatgagccacatccccgtgacatggatgaagaagatgaacatgtccggagcctgtttgaggagtttgtgggcaaggattctgagatcagtgctaatcagctcaagagggtcctgaatgaagtactttctaaacgaacagacatgaaatttgatggattcaacatcaacacttgcagagaaatgatcagcctgctggatagtgatgggacaggaagcctgggacctatggagttcaagactctctggctgaagatccgcacatatctggagatcttccaagaaatggaccataaccatgtagggaccattgaagcccatgagatgaggacagctctcaagaaagcaggtttcaccctcaacaaccaggtgcagcagaccattgccatgaggtatgcgtgcagtaagcttggtgttgacttcaacggttttgtggcgtgtatgatccgcctggagaccctgttcaaactgttcaggcttttggataaggaccagaatggcattgtccagctctccctggctgagtggctgtgctgtgtgctggtctgacccgctgtttggacatcaacaacttccctgtctcccacttgtccctttcagtcttatgaacatgtgacctcaggtggcatttactgactgttgtattgttccagccaactgttgttcctgagacactgcctttcccaacagagcagtctagggagccccagatctctcagcagcaccgagctatgagctaactgggcagatcccagggttcagcagaaggaaaagaatcaattaaagttgtgggccagg

SEQ ID NO: 12483 - protein, 703 aa, Rattus norvegicus
  ref <308>: DATABASE ACCESSION NUMBER: SWISS-Prot / BAA03369
  ref <309>: DATABASE ENTRY DATE: 2003-02-01
MAALAAGVSKQRAVAEGLGSNQNAVKYLGQDFETLRKQCLNSGVLFKDPEFPACPSALGYKDLGPGSPDTQGIVWKRPTELCPNPQFIVGGATRTDIRQGGLGDCWLLAAIASLTLNEKLLYRVLPRDQSFQKDYAGIFHFQFWQYGEWVEVVIDDRLPTKNGQLLFLHSEEGNEFWSALLEKAYAKLNGSYEALVGGSTIEGFEDFTGGISEFYDLKKPPENLYYIIQKALRKGSLLGCSIDVSTAAEAEATTRQKLVKGHAYSVTGVEEVNFHGRPEKLIRLRNPWGEVEWSGAWSDNAPEWNYIDPRRKEELDKKAEDGEFWMSFSDFLKQYSRLEICNLSPDSLSSEEIHKWNLVLFNGRWTRGSTAGGCLNYPGTYWTNPQFKIHLDEVDEDQEEGTSEPCCTVLLGLMQKNRRRQKRIGQGMLSIGYAVYQIPKELESHTDAHLGRDFFLGRQPSTCSSTYMNLREVSSRVRLPPGQYLVVPSTFEPFKDGDFCLRVFSEKKAKALEIGDTVSGHPHEPHPRDMDEEDEHVRSLFEEFVGKDSEISANQLKRVLNEVLSKRTDMKFDGFNINTCREMISLLDSDGTGSLGPMEFKTLWLKIRTYLEIFQEMDHNHVGTIEAHEMRTALKKAGFTLNNQVQQTIAMRYACSKLGVDFNGFVACMIRLETLFKLFRLLDKDQNGIVQLSLAEWLCCVLV

SEQ ID NO: 12484 - DNA, 3419 bp, Homo sapiens
  ref <308>: DATABASE ACCESSION NUMBER: Refseq / NM_001748
  ref <309>: DATABASE ENTRY DATE: 2001-01-23
ttccctccggtgaatcatcgctcgcagcggcggcgcccgcagtggccgcagcagcgcgccgggccctggccgcgccccagccgagcgcagcgcggagtcgccccgacctttctctgcgcagtacggccgccgggaccgcagcatggcgggcatcgcggccaagctggcgaaggaccgggaggcggccgaggggctgggctcccacgagagggccatcaagtacctcaaccaggactacgaggcgctgcggaacgagtgcctggaggccgggacgctcttccaggacccgtccttcccggccatcccctcggccctgggcttcaaggagttggggccctactccagcaaaacccggggcatgagatggaagcgccccacggagatctgcgctgacccccagtttatcattggaggagccacccgcacagacatctgccaaggagccctaggtgactgctggctgctggcagccattgcctccctcaccttgaatgaagaaatcctggctcgagtcgtccccctaaaccagagcttccaggaaaactatgcagggatctttcacttccagttctggcaatacggcgagtgggtggaggtggtggtggatgacaggctgcccaccaaggacggggagctgctctttgtgcattcagccgaagggagcgagttctggagcgccctgctggagaaggcatacgccaagatcaacggatgctatgaagctctatcagggggtgccaccactgagggcttcgaagacttcaccggaggcattgctgagtggtatgagttgaagaagccccctcccaacctgttcaagatcatccagaaagctctgcaaaaaggctctctccttggctgctccatcgacatcaccagcgccgcggactcggaggccatcacgtttcagaagctggtgaaggggcacgcgtactcggtcaccggagccgaggaggttgaaagtaacggaagcctacagaaactgatccgcatccgaaatccctggggagaagtggagtggacagggcggtggaatgacaactgcccaagctggaacactatagacccagaggagagggaaaggctgaccagacggcatgaagatggagaattctggatgtctttcagtgacttcctgaggcactattcccgcctggagatctgtaacctgaccccagacactctcaccagcgatacctacaagaagtggaaactcaccaaaatggatgggaactggaggcggggctccaccgcgggaggttgcaggaactacccgaacacattctggatgaaccctcagtacctgatcaagctggaggaggaggatgaggacgaggaggatggggagagcggctgcaccttcctggtggggctcattcagaagcaccgacggcggcagaggaagatgggcgaggacatgcacaccatcggctttggcatctatgaggttccagaggagttaagtgggcagaccaacatccacctcagcaaaaacttcttcctgacgaatcgcgccagggagcgctcagacaccttcatcaacctccgggaggtgctcaaccgcttcaagctgccgccaggagagtacattctcgtgccttccaccttcgaacccaacaaggatggggatttctgcatccgggtcttttctgaaaagaaagctgactaccaagctgtcgatgatgaaatcgaggccaatcttgaagagttcgacatcagcgaggatgacattgatgatggagtcaggagactgtttgcccagttggcaggagaggatgcggagatctctgcctttgagctgcagaccatcctgagaagggttctagcaaagcgccaagatatcaagtcagatggcttcagcatcgagacatgcaaaattatggttgacatgctagattcggacgggagtggcaagctggggctgaaggagttctacattctctggacgaagattcaaaaataccaaaaaatttaccgagaaatcgacgttgacaggtctggtaccatgaattcctatgaaatgcggaaggcattagaagaagcaggtttcaagatgccctgtcaactccaccaagtcatcgttgctcggtttgcagatgaccagctcatcatcgattttgataattttgttcggtgtttggttcggctggaaacgctattcaagatatttaagcagctggatcccgagaatactggaacaatagagctcgaccttatctcttggctctgtttctcagtactttgaagttataactaatctgcctgaagacttctcatgatggaaaatcagccaaggactaagcttccatagaaatacactttgtatctggacctcaaaattatgggaacatttacttaaacggatgatcatagctgaaaataatgatactgtcaatttgagatagcagaagtttcacacatcaaagtaaaagatttgcatatcattatactaaatgcaaatgagtcgcttaacccttgacaaggtcaaagaaagctttaaatctgtaaatagtatacactttttacttttacacactttcctgttcatagcaatattaaatcaggaaaaaaaaatgcagggaggtatttaacagctgagcaaaaacattgagtcgctctcaaaggacacgaggcccttggcagggaatatttaaagcaacttcaagtttaaaatgcagctgttgattctaccaaacaacagtccaagattaccatttcccatgagccaactgggaaacatggtatatcatgaagtaatcttgtcaaggcatctggagagtccaggagaggagactcacctctgtcgcttgggttaaacaagagacaggttttgtagaatattgattggtaatagtaaatcgttctccttacaatcaagttcttgaccctattcggccttatacatctggtcttacaaagaccaaagggatcctgcgcttgatcaactgaaccagtatgccaaaaccaggcatccaatttgtaaaccaattatgataaaggacaaaataagctgtttgccacctcaaaactttatgaacttcaccaccactagtgtctgtccatggagttagaggggacatcacttagaagttcttatagaaaggacacaagtttgtttcctggctttaccttgggaaaatgctagcaacattatagaaattttgccttgttgccttatcttcttccaaatgtactgttaaataaaaataaagggttaccccatgcaatcacaccatgccatgttttccttcctggagggcagccccacaggacggtttatgagcacacaattatagcttgtttctactttaacagggtatgctgcctctgtaaattcatgtattcaaaggaaaagacaccttgcctataattaaaatgtggaactataaaattttttaaaatccaaaaaaaaaaaaaaa

SEQ ID NO: 12485 - protein, 700 aa, Homo sapiens
  ref <308>: DATABASE ACCESSION NUMBER: Refseq / NP_001739
  ref <309>: DATABASE ENTRY DATE: 2001-01-23
MAGIAAKLAKDREAAEGLGSHERAIKYLNQDYEALRNECLEAGTLFQDPSFPAIPSALGFKELGPYSSKTRGMRWKRPTEICADPQFIIGGATRTDICQGALGDCWLLAAIASLTLNEEILARVVPLNQSFQENYAGIFHFQFWQYGEWVEVVVDDRLPTKDGELLFVHSAEGSEFWSALLEKAYAKINGCYEALSGGATTEGFEDFTGGIAEWYELKKPPPNLFKIIQKALQKGSLLGCSIDITSAADSEAITFQKLVKGHAYSVTGAEEVESNGSLQKLIRIRNPWGEVEWTGRWNDNCPSWNTIDPEERERLTRRHEDGEFWMSFSDFLRHYSRLEICNLTPDTLTSDTYKKWKLTKMDGNWRRGSTAGGCRNYPNTFWMNPQYLIKLEEEDEDEEDGESGCTFLVGLIQKHRRRQRKMGEDMHTIGFGIYEVPEELSGQTNIHLSKNFFLTNRARERSDTFINLREVLNRFKLPPGEYILVPSTFEPNKDGDFCIRVFSEKKADYQAVDDEIEANLEEFDISEDDIDDGVRRLFAQLAGEDAEISAFELQTILRRVLAKRQDIKSDGFSIETCKIMVDMLDSDGSGKLGLKEFYILWTKIQKYQKIYREIDVDRSGTMNSYEMRKALEEAGFKMPCQLHQVIVARFADDQLIIDFDNFVRCLVRLETLFKIFKQLDPENTGTIELDLISWLCFSVL

SEQ ID NO: 12486 - DNA, 932 bp, Rattus norvegicus; identical to SEQ ID NO: 1769
  ref <308>: DATABASE ACCESSION NUMBER: EMBL / D14819
  ref <309>: DATABASE ENTRY DATE: 1999-02-02

SEQ ID NO: 12487 - protein, 144 aa, Rattus norvegicus; identical to SEQ ID NO: 1770
  ref <308>: DATABASE ACCESSION NUMBER: SWISS-Prot / BAA03557
  ref <309>: DATABASE ENTRY DATE: 2003-02-01

SEQ ID NO: 12488 - DNA, 4277 bp, Homo sapiens; identical to SEQ ID NO: 1771
  ref <308>: DATABASE ACCESSION NUMBER: Refseq / NM_016257
  ref <309>: DATABASE ENTRY DATE: 2002-11-14

SEQ ID NO: 12489 - protein, 191 aa, Homo sapiens; identical to SEQ ID NO: 1772
  ref <308>: DATABASE ACCESSION NUMBER: Refseq / NP_057341
  ref <309>: DATABASE ENTRY DATE: 2002-11-14

SEQ ID NO: 12490 - DNA, 1000 bp, Rattus norvegicus
  ref <308>: DATABASE ACCESSION NUMBER: EMBL / D14987
  ref <309>: DATABASE ENTRY DATE: 1999-09-29
ctggaatcctaacagcatctacacaaagctatttataatgccagactatacttggtttgaaggaataccttttcatgcctttgggatttcaaaagaaactttgcaaaatgtttgtaataagtttgtggtgaaagaagaagatttgattttattggcttatcccaagtcaggaacgaactggctgattgaaattgtctgcttgattcagaccaagggagatcccaagtggatccaatctgtgactatctgggatcgctcaccctggatagagactgatgtaggatatgatatattaatcaaaaagaaaggaccacgactcatgacctcccatcttcccatgcatcttttctccaagtctctcttcagttccaaggccaaggtgatctatctcatcagaaatcccagagatgttcttgtttctggttattatttctggggtaattcaactcttgtgaagaagccagactcactgggaacttatgttgaatggttcctcaaaggaaatgttctatatggatcatggtttgagcacatccgtgcctggctgtccatgcgagaatgggacaacttcttgttactgtactatgaagacatgaaaaaggatacaatgggaaccataaagaagatatgtgacttcctggggaaaaaattagagccagatgagctggatttggtcctcaagtatagttccttccaagtcatgaaagaaaatgacatgtccaattatagcctcctgatgaaaaaatcaatttttactggaattggcctcatgaggaaaggcactattggggactggaagaatcacttcactgtatcccaagctgaagcctttgataaagtgtttcaggagaaaatggccggtttccctccagggatgttcccatgggaataaaatttcaaaagttttaaatattttatgaacattgatatttatgtttctgttgttctatgtctgaataactgaatgtggtcatcgaataaatcctgttctggtattgtg

SEQ ID NO: 12491 - protein, 283 aa, Rattus norvegicus
  ref <308>: DATABASE ACCESSION NUMBER: SWISS-Prot / BAA03632
  ref <309>: DATABASE ENTRY DATE: 2001-10-16
PDYTWFEGIPFHAFGISKETLQNVCNKFVVKEEDLILLAYPKSGTNWLIEIVCLIQTKGDPKWIQSVTIWDRSPWIETDVGYDILIKKKGPRLMTSHLPMHLFSKSLFSSKAKVIYLIRNPRDVLVSGYYFWGNSTLVKKPDSLGTYVEWFLKGNVLYGSWFEHIRAWLSMREWDNFLLLYYEDMKKDTMGTIKKICDFLGKKLEPDELDLVLKYSSFQVMKENDMSNYSLLMKKSIFTGIGLMRKGTIGDWKNHFTVSQAEAFDKVFQEKMAGFPPGMFPWE

SEQ ID NO: 12492 - DNA, 1038 bp, Homo sapiens
  ref <308>: DATABASE ACCESSION NUMBER: EMBL / L20000
  ref <309>: DATABASE ENTRY DATE: 2000-03-04
gaattcggcacgaggttgaaaccctcacaccacgcaggaagaggtcatcatcatgtcggacgatttcttatggtttgaaggcatagctttccctactatgggtttcagatccgaaaccttaagaaaagtacgtgatgagttcgtgataagggatgaagatgtaataatattgacttaccccaaatcaggaacaaactggttggctgagattctctgcctgatgcactccaagggggatgccaagtggatccaatctgtgcccatctgggagcgatcaccctgggtagagagtgagattgggtatacagcactcagtgaaagcgagagtccacgtttattctcctcccacctccccatccagttattccccaagtctttcttcagttccaaggccaaggtgatttatctcatgagaaatcccagagatgttttggtgtctggttattttttctggaaaaacatgaagtttattaagaaaccaaagtcatgggaagaatattttgaatggttttgtcaaggaactgtgctatatgggtcatggtttgaccacattcatggctggatgcccatgagagaggagaaaaacttcctgttactgagttatgaggagctgaaacaggacacaggaagaaccatagagaagatctgtcaattcctgggaaagacgttagaacccgaagaactgaacttaattctcaagaacagctcctttcagagcatgaaagaaaacaagatgtccaattattccctcctgagtgttgattatgtagtggacaaagcacaacttctgagaaaaggtgtatctggggactggaaaaatcacttcacagtggcccaagctgaagactttgataaattgttccaagagaagatggcagatcttcctcgagagctgttcccatgggaataacgtccaaaacactctggatcttatatggagaatgacattgattctcctgtccttgtacatgtacctgactggggtcattgtgtaagacttattattttatcctgaaaccttaaatatcaaacctctgc

SEQ ID NO: 12493 - protein, 284 aa, Homo sapiens
  ref <308>: DATABASE ACCESSION NUMBER: SWISS-Prot / AAA35758
  ref <309>: DATABASE ENTRY DATE: 2002-06-15
SDDFLWFEGIAFPTMGFRSETLRKVRDEFVIRDEDVIILTYPKSGTNWLAEILCLMHSKGDAKWIQSVPIWERSPWVESEIGYTALSETESPRLFSSHLPIQLFPKSFFSSKAKVIYLMRNPRDVLVSGYFFWKNMKFIKKPKSWEEYFEWFCQGTVLYGSWFDHIHGWMPMREEKNFLLLSYEELKQDTGRTIEKICQFLGKTLEPEELNLILKNSSFQSMKENKMSNYSLLSVDYVVDKAQLLRKGVSGDWKNHFTVAQAEDFDKLFQEKMADLPRELFPWE

SEQ ID NO: 12494 - DNA, 1000 bp, Rattus norvegicus; identical to SEQ ID NO: 12490
  ref <308>: DATABASE ACCESSION NUMBER: EMBL / D14987
  ref <309>: DATABASE ENTRY DATE: 1999-09-29

SEQ ID NO: 12495 - protein, 283 aa, Rattus norvegicus; identical to SEQ ID NO: 12491
  ref <308>: DATABASE ACCESSION NUMBER: SWISS-Prot / BAA03632
  ref <309>: DATABASE ENTRY DATE: 2001-10-16

SEQ ID NO: 12496 - DNA, 1038 bp, Homo sapiens; identical to SEQ ID NO: 12492
  ref <308>: DATABASE ACCESSION NUMBER: EMBL / L20000
  ref <309>: DATABASE ENTRY DATE: 2000-03-04

SEQ ID NO: 12497 - protein, 284 aa, Homo sapiens; identical to SEQ ID NO: 12493
  ref <308>: DATABASE ACCESSION NUMBER: SWISS-Prot / AAA35758
  ref <309>: DATABASE ENTRY DATE: 2002-06-15

SEQ ID NO: 12498 - DNA, 1183 bp, Rattus norvegicus
  ref <308>: DATABASE ACCESSION NUMBER: EMBL / D16443
  ref <309>: DATABASE ENTRY DATE: 2000-04-14
aacccgcagctgagccagaggctccggccctgtgcgcctaccgtggccccgccactatggccggcgtgtgggcgccggagcactcggttgaagcgcacagcaaccagtcaagtgctgccgacggctgcggctctgtgtccgtggccttccccatcaccatgatggtcactggcttcgtgggcaacgcgctggccatgttgcttgtggtgcgcagctatagacgccgggagagcaaacgcaaaaagtctttcctgctgtgcattggctggctggcgctcaccgacttggtggggcagctcctgaccagtccggtggtcatcctcgtgtacctgtcgcagcgacgctgggagcaactcgacccatcggggcgcctgtgcaccttcttcgggctgaccatgacagtgttcggactgtcctcgctcttggtggccagcgccatggccgtggagcgcgccctggctatccgtgcgccgcactggtatgccagccacatgaagactcgcgccacgccggtactgctgggtgtgtggctgtctgtgctcgccttcgcgctgctgcctgtgctgggcgtgggccgctacagcgtgcagtggcccggcacgtggtgcttcatcagcaccgggccggcgggcaacgagacggactctgcgcgggagccgggcagcgtggcctttgcctccgccttcgcctgtctaggcttgctggctctggtggtgacctttgcctgcaacctggcgaccatcaaagccctggtgtcccgctgccgggccaaagccgccgcctcgcagtccagcgcccagtggggccggatcaccacggagacggctatccagcttatggggatcatgtgtgtactgtccgtctgctggtcgccgctattgataatgatgctgaaaatgatcttcaatcagatgtcagtagagcaatgcaagacgcagatgggaaaggagaaggagtgcaattccttcctaatcgccgttcgcctggcttcgctgaaccagatcttggatccctgggtttatctgctgctaagaaagatccttcttcgaaagttctgccaggtagcaaacgctgtctccagctgctctagtgaccaacagaaagggcaggccatctccttgtctaatgaagtagtacatccagggccatgaaagagaacagagccaatgagcttagacacagc

SEQ ID NO: 12499 - protein, 365 aa, Rattus norvegicus
  ref <308>: DATABASE ACCESSION NUMBER: SWISS-Prot / BAA03912
  ref <309>: DATABASE ENTRY DATE: 2000-05-30
MAGVWAPEHSVEAHSNQSSAADGCGSVSVAFPITMMVTGFVGNALAMLLVVRSYRRRESKRKKSFLLCIGWLALTDLVGQLLTSPVVILVYLSQRRWEQLDPSGRLCTFFGLTMTVFGLSSLLVASAMAVERALAIRAPHWYASHMKTRATPVLLGVWLSVLAFALLPVLGVGRYSVQWPGTWCFISTGPAGNETDSAREPGSVAFASAFACLGLLALVVTFACNLATIKALVSRCRAKAAASQSSAQWGRITTETAIQLMGIMCVLSVCWSPLLIMMLKMIFNQMSVEQCKTQMGKEKECNSFLIAVRLASLNQILDPWVYLLLRKILLRKFCQIRDHTNYASSSTSLPCPGSSVLMWSDQLER

SEQ ID NO: 12500 - DNA, 1183 bp, Rattus norvegicus; identical to SEQ ID NO: 12498
  ref <308>: DATABASE ACCESSION NUMBER: EMBL / D16443
  ref <309>: DATABASE ENTRY DATE: 2000-04-14

SEQ ID NO: 12501 - protein, 365 aa, Rattus norvegicus; identical to SEQ ID NO: 12499
  ref <308>: DATABASE ACCESSION NUMBER: SWISS-Prot / BAA03912
  ref <309>: DATABASE ENTRY DATE: 2000-05-30

SEQ ID NO: 12502 - DNA, 1743 bp, Rattus norvegicus; identical to SEQ ID NO: 1809
  ref <308>: DATABASE ACCESSION NUMBER: EMBL / D17370
  ref <309>: DATABASE ENTRY DATE: 1999-09-29

SEQ ID NO: 12503 - protein, 398 aa, Rattus norvegicus; identical to SEQ ID NO: 1810
  ref <308>: DATABASE ACCESSION NUMBER: SWISS-Prot / CAA37547
  ref <309>: DATABASE ENTRY DATE: 1996-10-01

SEQ ID NO: 12504 - DNA, 1326 bp, Homo sapiens
  ref <308>: DATABASE ACCESSION NUMBER: EMBL / S52784
  ref <309>: DATABASE ENTRY DATE: 2000-03-04
ttcttttcctctcttcttctttcgcggttcagcatgcaggaaaaagacgcctcctcacaaggtttcctgccacacttccaacatttcgccacgcaggcgatccatgtgggccaggatccggagcaatggacctccagggctgtagtgccccccatctcactgtccaccacgttcaagcaaggggcgcctggccagcactcgggttttgaatatagccgttctggaaatcccactaggaattgccttgaaaaagcagtggcagcactggatggggctaagtactgtttggcctttgcttcaggtttagcagccactgtaactattacccatcttttaaaagcaggagaccaaattatttgtatggatgatgtgtatggaggtacaaacaggtacttcaggcaagtggcatctgaatttggattaaagatttcttttgttgattgttccaaaatcaaattactagaggcagcaattacaccagaaaccaagcttgtttggatcgaaacccccacaaaccccacccagaaggtgattgacattgaaggctgtgcacatattgtccataagcatggagacattattttggtcgtggataacacttttatgtcaccatatttccagcgccctttggctctgggagctgatatttctatgtattctgcaacaaaatacatgaatggccacagtgatgttgtaatgggcctggtgtctgttaattgtgaaagccttcataatagacttcgtttcttgcaaaactctcttggagcagttccatctcctattgattgttacctctgcaatcgaggtctgaagactctacatgtccgaatggaaaagcatttcaaaaacggaatggcagttgcccagttcctggaatctaatccttgggtagaaaaggttatttatcctgggctgccctctcatccacagcatgagttggtgaagcgtcagtgtacaggttgtacagggatggtcaccttttatattaagggcactcttcagcatgctgagattttcctcaagaacctaaagctatttactctggccgagagcttgggaggattcgaaagccttgctgagcttccggcaatcatgactcatgcatcagttcttaagaatgacagagatgtccttggaattagtgacacactgattcgactttctgtgggcttagaggatgaggaagacctactggaagatctagatcaagctttgaaggcagcacaccctccaagtggaattcacagctagtattccagagctgctattagaagctgcttcctgtgaagatcaatcttcctgagtaattaatggaccaacaatgag

SEQ ID NO: 12505 - protein, 405 aa, Homo sapiens; identical to SEQ ID NO: 1812
  ref <308>: DATABASE ACCESSION NUMBER: SWISS-Prot / P32929
  ref <309>: DATABASE ENTRY DATE: 2001-10-16

SEQ ID NO: 12506 - DNA, 1715 bp, Rattus norvegicus
  ref <308>: DATABASE ACCESSION NUMBER: EMBL / D17695
  ref <309>: DATABASE ENTRY DATE: 1999-01-21
cagaaggagttgatgaaccgttgcggggagatgctccacatccgctaccggctgcttcgccaggctctggcggagtgcctggggaccctcatccttgtgatgttcggctgtggttccgtggctcaagtggtgctcagccgagggacccatggtggcttcctcaccatcaacttggcttttggcttcgctgtcacccttgccatcttggtggctggccaagtgtctggagcccacttgaaccctgctgtgacctttgcaatgtgcttcctggcacgagagccctggatcaagctgcccatctacacactggcacagaccctcggggccttcttgggtgctgggattgtttttgggctctactatgatgcaatctgggcctttgctggcaatgagcttgttgtctccggccccaatggcacagctggtatctttgccacctatccctctggacacttggatatggtcaatggcttctttgatcagttcataggcacagcagcccttattgtgtgtgtgctggccattgttgacccttataacaaccctgtgccccggggcctggaggccttcactgtgggccttgtggtcctggtcattgggacctccatgggcttcaattctggctatgccgtcaacccagctcgtgactttggacctcgccttttcactgccctggctggctggggttcagaagtctttacgactggccagaactggtggtgggtacccatcgtctctccactcctgggttccattggtggtgtcttcgtgtaccagctcatgattggctgccacctggagcagcccccgccttccactgaggcagagaatgtgaagctggcccacatgaagcacaaggagcagatctgagtgggcagtgccacacacacacacacccccactgctcactctcttgagtgtccactgactgtgtgggggacaccccataaaagcccccttgtgatgcctctcgggctaaaaacgctccctgtatccacccccgctggatggcccctccagaattcctactgaactctgccagctaggggattaggttccgctcttaagcccaagtaggatagcaagtaagaccaaacatcctcttgtttctgaaaaggaagaggatgtggagagagagagagagagagagagagagagagagagagagagagagagagagagcgcaagtgtatgtgtgctgttctccaggctgaaagcaagggcaagggaccaagttttcaaaacaaactagcagctcaagggaaccccagggggaagggagagagtgagtcaggaaagtgccacagtatacttgccttcagggactccagtgtggaggtggacccaggagtgcgtttctaagtatgtatgtgtctactgagttttcgaaatggacttctaggcttagggagcgggggaggcataagaggggcgtacgtcacatctggagctgtgatcctcaactaggggctgtgtatgtaatatgtttctgttataagatagacattgggaggggctaaagtcctggtcgtaagtttcataatttgttttttttaaatatataaatatatacatacatatatatgttacagttttaggaataggggtgggaaactccactttttaaaagggtcttccttcctttaatcccccaatcaacaatgtactgttgccttttatatataaagaaaagaataaaagtatgcatttgacag

SEQ ID NO: 12507 - protein, 292 aa, Rattus norvegicus
  ref <308>: DATABASE ACCESSION NUMBER: SWISS-Prot / BAA04559
  ref <309>: DATABASE ENTRY DATE: 1998-07-15
MGRQKELMNRCGEMLHIRYRLLRQALAECLGTLILVMFGCGSVAQVVLSRGTHGGFLTINLAFGFAVTLAILVAGQVSGAHLNPAVTFAMCFLAREPWIKLPIYTLAQTLGAFLGAGIVFGLYYDAIWAFAGNELVVSGPNGTAGIFATYPSGHLDMVNGFFDQFIGTAALIVCVLAIVDPYNNPVPRGLEAFTVGLVVLVIGTSMGFNSGYAVNPARDFGPRLFTALAGWGSEVFTTGQNWWWVPIVSPLLGSIGGVFVYQLMIGCHLEQPPPSTEAENVKLAHMKHKEQI

SEQ ID NO: 12508 - DNA, 1446 bp, Homo sapiens
  ref <308>: DATABASE ACCESSION NUMBER: Refseq / NM_004925
  ref <309>: DATABASE ENTRY DATE: 2002-11-05
tgctcgctgcgccaccgcctcccgccacccctgcccgcccgacagcgccgccgcctgccccgccatgggtcgacagaaggagctggtgtcccgctgcggggagatgctccacatccgctaccggttgctccgacaggcgctggccgagtgcctggggaccctcatcctcgtgatgtttggctgtggctccgtggcccaggttgtgctcagccggggcacccacggtggtttcctcaccatcaacctggcctttggctttgctgtcactctgggcatcctcatcgctggccaggtctctggggcccacctgaaccctgccgtgacctttgccatgtgcttcctggctcgtgagccctggatcaagctgcccatctacaccctggcacagacgctgggagccttcttgggtgctggaatagtttttgggctgtattatgatgcaatctggcactttgccgacaaccagctttttgtttcgggccccaatggcacagccggcatctttgctacctacccctctggacacttggatatgatcaatggcttctttgaccagttcataggcacagcctcccttatcgtgtgtgtgctggccattgttgacccttacaacaaccccgtcccccgaggcctggaggccttcaccgtgggcctggtggtcctggtcattggcacctccatgggcttcaactccggctatgccgtcaaccctgcccgggactttggcccccgcctttttacagcccttgcgggctggggctctgcagtcttcacgaccggccagcattggtggtgggtgcccatcgtgtccccactcctgggctccattgcgggtgtcttcgtgtaccagctgatgatcggctgccacctggagcagcccccaccctccaacgaggaagagaatgtgaagctggcccatgtgaagcacaaggagcagatctgagtggcaagggccatctcccactccgctgccctggccttgagcatccactgactgtccaaggccactcccaagaagccccccttcacgatccaccctttcaggctaaggagctccctatctaccctcaccccacgaagacagccccttcaggatttccactggaccttgcccaaatagcaccttaggccactgcccctaagctggggtggaaccggaatttgggtcaatacatccttttgtctcccaagggaagagaatgggcagcaggtatgtgtgtgtgtgtgcatgtgtgcatgtgtgtgcatgtgtgtgcaggggtgtgtgtgtggggggggttcccagatattcagggcaagaccagtcggaaggatctgctattggggacccagagacagggaggcagcctgtccatctgtgcataaggagaggaaagttccagggtgtgtatgttttcaggggccttcacatggaggagctgcagatagatatgtgtttctccggaa

SEQ ID NO: 12509 - protein, 292 aa, Homo sapiens
  ref <308>: DATABASE ACCESSION NUMBER: Refseq / NP_004916
  ref <309>: DATABASE ENTRY DATE: 2002-11-05
MGRQKELVSRCGEMLHIRYRLLRQALAECLGTLILVMFGCGSVAQVVLSRGTHGGFLTINLAFGFAVTLGILIAGQVSGAHLNPAVTFAMCFLAREPWIKLPIYTLAQTLGAFLGAGIVFGLYYDAIWHFADNQLFVSGPNGTAGIFATYPSGHLDMINGFFDQFIGTASLIVCVLAIVDPYNNPVPRGLEAFTVGLVVLVIGTSMGFNSGYAVNPARDFGPRLFTALAGWGSAVFTTGQHWWWVPIVSPLLGSIAGVFVYQLMIGCHLEQPPPSNEEENVKLAHVKHKEQI

SEQ ID NO: 12510 - DNA, 3631 bp, Rattus norvegicus
  ref <308>: DATABASE ACCESSION NUMBER: EMBL / D25290
  ref <309>: DATABASE ENTRY DATE: 2000-02-01
cctgggcgagtggcagggtgtccccaggagccggaaggcaaacagagataccctctgaaagccaagcagagaacattaaggaagaaaggaggaatgagcctgggtctggtgcggtgaaaagagacgcattaaggaaaggggaactcacaacccagacgctccactgccagccttgccatcagcatgagaacttaccggtacttcttgctgctcttttgggtcggccagccctacccaactttctcaaacccgttatctaaaaggactagtggcttcccagcaaagaggagggccctggagctctctgccaacagcaggaatgagctgagccgttcaaaaaggagttggatgtggaatcagttcttcctcctggaggaatacacgggatcagattatcagtacgtcggcaagttacattcagaccaggatagaggagatggatcacttaaatatatcctttcaggagatggagcgggagatctcttcattatcaatgaaaacacaggcgacatacaagccaccaagaggctggacagggaagagaaacccgtttacatccttcgagcccaagctatcaacagaaggacagggagacccgtcgagcctgagtctgaattcatcatcaagatccatgacatcaatgataatgagccaatattcaccaaggatgtttacacagccacagtccccgagatggcagatgtcggaacatttgtagtccaagtcacagcaactgatgccgatgacccgacgtacgggaacagtgctaaagtcgtgtacagcatcctgcagggacagccctacttttcagtggagtcggaaacaggtatcatcaagacagcgttgctcaacatggatcgagaaaacagagagcagtaccaagtggtgattcaggccaaggacatgggcggccagatgggaggactgtcggggaccacgaccgtgaacatcacactgacagatgtcaatgacaatcctcctcgcttcccccagagtacctatcagtttaagactcccgagtcttctccaccaggaacaccaattggcaggatcaaagccagtgatgctgatgtgggagaaaatgcagagatcgagtacagcatcacagacggtgagggacatgatatgtttgacgtcatcaccgaccaggaaacccaggaagggattataactgtcaaaaagctcttggattttgaaaagaagagagtgtacaccctcaaggtggaagcctccaatccccacatcgaaccccgatttctctacctgggtccgttcaaagactcggccacagtgagaatcgtggtagatgacgtagatgaacctcctgtcttcagcaaaccggcctacatcctacagatacgagaggatgctcagataaacacaaccataggctctgtcgcagctcaggatcctgacgctgccaggaatcctgtcaagtactcggtggatagacacacagatatggacaggatattcaacattgattctggaaatggctccatttttacatcaaaacttctcgaccgggaaacgctgttgtggcataacatcacagtgatagcaacggagattaataatccaaagcaaagcagccgcgtgcctctatatattaaagttctcgacgtcaatgacaatgccccagaatttgctgagttctatgaaacttttgtctgtgaaaaagcaaaggcggatcagctgattcagaccctgcacgctgttgacaaggatgatccttacagtggacaccaattctccttctctttggccccagaagcagccagtggctctaattttaccatacaagacaacaaagacaacactgcagggatcctaactcggaaaaatggctataacagacacgagatgagcacttatctcctgccggtggtcatttcagacaacgactacccagtccaaagcagcactgggacagtgactgtccgggtctgtgcatgtgaccaccatggaaacatgcagtcctgccacgccgaggccctcatccaccccacagggctgagcacaggggctctggtggccatccttctgtgcatcgtgatcctactagtgacagtggtgctgttcgcagctctgaggcggcagcgaaagaaagagcctttgatcatttccaaagaggacatcagagacaacattgtcagttacaacgacgaaggtggcggagaggaagacacccaggcctttgatatcggaaccctgaggaaccctaagccatggagacagcaatcgcgcagggacatggtgcctgaagctctttttctaccacggcggactccaacagctcgtgacaacacggatgtcagagatttcattagccaaaggttaaggaaaatgaacacggacccaacagcccctccctacgactccttggccacctatgcctacgaaggcactggctcggtggccgactccctgagctcactagaatcagtgaccacagatggagaccaagattatggctatttgagtgactggggccctcggttcaaaaagctggcagatatgtacggagggatggacagtgacaaagactcctaatctgttgccttttcattttccaatatgacactggaatatgtgacgtggctattcctttctatttatccactattccgtgaggggttctccgttgtacccgttccaaaagtcaatggctgcagtccgtgtggatccaatgttagagacttttttctagtacacttttatgagcttctaagaggcaaatttttattttttagttcatgcagttaaccaagttagcccagcaggcacgctgcgggaggagaggaaggaacggcgtttttcccgtgttccccttagagcaggttggccacgccccttactgctggcctagactctactttggttcacggcctccattccgctgaatgctccaaatgtacatttcacatgctacacatgctaatgaagaagggatcatactttgatgattaaaaatatagttttagtatttaaaaggggggagggaacaattgggaaattgatcctggtctatcagttgtcaaggagataattaactgtgaaggggtttgtaaggatatgcgtgtgtcaaggaatataaagtggggcatcctgtctgtgctggaaggggtgtttctggcatcaacaaatactcgtaatgctgaatccttccatgttctaagatggcttagaagcaaatcaagtggtatcatgttcaaagacagtaacgaaagacagggctgtgttccctgacgagattttgttgcatgtgataaacagatgcttcaccatcatgccaaacaaaggaaaaaagagaaatagctttacaaaaaaaaattaacaaaggacatatttagggaatttcaaggttttgtactaccaacagtatcccgggtcccttcattctttcaactatcagtaaactaatgagaagtaggtctaatcatataagcgtccttgagagaatttcctgaggcaaatgttaactctttgtctgtagttgttgttactattatcctactatacctgagtgtagcagtgtgaagtacaataattcatattcttcaaaaaaagaaaaaaaaaggatccgcggccgccgaattcagcttggacttaaccaggctggaacttgcta

SEQ ID NO: 12511 - protein, 789 aa, Rattus norvegicus
  ref <308>: DATABASE ACCESSION NUMBER: SWISS-Prot / P55280
  ref <309>: DATABASE ENTRY DATE: 2001-10-16
MRTYRYFLLLFWVGQPYPTFSNPLSKRTSGFPAKRRALELSANSRNELSRSKRSWMWNQFFLLEEYTGSDYQYVGKLHSDQDRGDGSLKYILSGDGAGDLFIINENTGDIQATKRLDREEKPVYILRAQAINRRTGRPVEPESEFIIKIHDINDNEPIFTKDVYTATVPEMADVGTFVVQVTATDADDPTYGNSAKVVYSILQGQPYFSVESETGIIKTALLNMDRENREQYQVVIQAKDMGGQMGGLSGTTTVNITLTDVNDNPPRFPQSTYQFKTPESSPPGTPIGRIKASDADVGENAEIEYSITDGEGHDMFDVITDQETQEGIITVKKLLDFEKKRVYTLKVEASNPHIEPRFLYLGPFKDSATVRIVVDDVDEPPVFSKPAYILQIREDAQINTTIGSVAAQDPDAARNPVKYSVDRHTDMDRIFNIDSGNGSIFTSKLLDRETLLWHNITVIATEINNPKQSSRVPLYIKVLDVNDNAPEFAEFYETFVCEKAKADQLIQTLHAVDKDDPYSGHQFSFSLAPEAASGSNFTIQDNKDNTAGILTRKNGYNRHEMSTYLLPVVISDNDYPVQSSTGTVTVRVCACDHHGNMQSCHAEALIHPTGLSTGALVAILLCIVILLVTVVLFAALRRQRKKEPLIISKEDIRDNIVSYNDEGGGEEDTQAFDIGTLRNPKPWRQQSRRDMVPEALFLPRRTPTARDNTDVRDFISQRLRKMNTDPTAPPYDSLATYAYEGTGSVADSLSSLESVTTDGDQDYGYLSDWGPRFKKLADMYGGMDSDKDS

SEQ ID NO: 12512 - DNA, 4315 bp, Homo sapiens
  ref <308>: DATABASE ACCESSION NUMBER: EMBL / D31784
  ref <309>: DATABASE ENTRY DATE: 1999-01-21
tgagagccaagcaaagaacattaaggaaggaaggaggaatgaggctggatacggtgcagtgaaaaaggcacttccaagagtggggcactcactacgcacagactcgacggtgccatcagcatgagaacttaccgctacttcttgctgctcttttgggtgggccagccctacccaactctctcaactccactatcaaagaggactagtggtttcccagcaaagaaaagggccctggagctctctggaaacagcaaaaatgagctgaaccgttcaaaaaggagctggatgtggaatcagttctttctcctggaggaatacacaggatccgattatcagtatgtgggcaagttacattcagaccaggatagaggagatggatcacttaaatatatcctttcaggagatggagcaggagatctcttcattattaatgaaaacacaggcgacatacaggccaccaagaggctggacagggaagaaaaacccgtttacatccttcgagctcaagctataaacagaaggacagggagacccgtggagcccgagtctgaattcatcatcaagatccatgacatcaatgacaatgaaccaatattcaccaaggaggtttacacagccactgtccctgaaatgtctgatgtcggtacatttgttgtccaagtcactgcgacggatgcagatgatccaacatatgggaacagtgctaaagttgtctacagtattctacagggacagccctatttttcagttgaatcagaaacaggtattatcaagacagctttgctcaacatggatcgagaaaacagggagcagtaccaagtggtgattcaagccaaggatatgggcggccagatgggaggattatctgggaccaccaccgtgaacatcacactgactgatgtcaacgacaaccctccccgattcccccagagtacataccagtttaaaactcctgaatcttctccaccggggacaccaattggcagaatcaaagccagcgacgctgatgtgggagaaaatgctgaaattgagtacagcatcacagacggtgaggggctggatatgtttgatgtcatcaccgaccaggaaacccaggaagggattataactgtcaaaaagctcttggactttgaaaagaagaaagtgtatacccttaaagtggaagcctccaatccttatgttgagccacgatttctctacttggggcctttcaaagattcagccacggttagaattgtggtggaggatgtagatgagccacctgtcttcagcaaactggcctacatcttacaaataagagaagatgctcagataaacaccacaataggctccgtcacagcccaagatccagatgctgccaggaatcctgtcaagtactctgtagatcgacacacagatatggacagaatattcaacattgattctggaaatggttcgatttttacatcgaaacttcttgaccgagaaacactgctatggcacaacattacagtgatagcaacagagatcaataatccaaagcaaagtagtcgagtacctctatatattaaagttctagatgtcaatgacaacgccccagaatttgctgagttctatgaaacttttgtctgtgaaaaagcaaaggcagatcagttgattcagaccctgcatgctgttgacaaggatgacccttatagtggacaccaattttcgttttccttggcccctgaagcagccagtggctcaaactttaccattcaagacaacaaagacaacacggcgggaatcttaactcggaaaaatggctataatagacacgagatgagcacctatctcttgcctgtggtcatttcagacaacgactacccagttcaaagcagcactgggacagtgactgtccgggtctgtgcatgtgaccaccacgggaacatgcaatcctgccatgcggaggcgctcatccaccccacgggactgagcacgggggctctggttgccatccttctgtgcatcgtgatcctactagtgacagtggtgctgtttgcagctctgaggcggcagcgaaaaaaagagcctttgatcatttccaaagaggacatcagagataacattgtcagttacaacgacgaaggtggtggagaggaggacacccaggcttttgatatcggcaccctgaggaatcctgaagccatagaggacaacaaattacgaagggacattgtgcccgaagcccttttcctaccccgacggactccaacagctcgcgacaacaccgatgtcagagatttcattaaccaaaggttaaaggaaaatgacacggaccccactgccccgccatacgactccttggccacttacgcctatgaaggcactggctccgtggcggattccctgagctcgctggagtcagtgaccacggatgcagatcaagactatgattaccttagtgactggggacctcgattcaaaaagcttgcagatatgtatggaggagtggacagtgacaaagactcctaatctgttgcctttttcattttccaatacgacactgaaatatgtgaagtggctatttctttatatttatccactactccgtgaaggcttctctgttctacccgttccaaaagccaatggctgcagtccgtgtggatccaatgttagagacttttttctagtacacttttatgagcttccaaggggcaaatttttattttttagtgcatccagttaaccaagtcagcccaacaggcaggtgccggaggggaggacagggaacagtatttccacttgttctcagggcagcgtgcccgcttccgctgtcctggtgttttactacactccatgtcaggtcagccaactgccctaactgtacatttcacaggctaatgggataaaggactgtgctttaaagataaaaatatcatcatagtaaaagaaatgagggcatatcggctcacaaagagataaactacataggggtgtttatttgtgtcacaaagaatttaaaataacacttgcccatgctatttgttcttcaagaactttctctgccatcaactactattcaaaacctcaaatccacccatatgttaaaattctcattactcttaaggaatagaagcaaattaaacggtaacatccaaaagcaaccacaaacctagtacgacttcattccttccactaactcatagtttgttatatcctagactagacatgcgaaagtttgcctttgtaccatataaagggggagggaaatagctaataatgttaaccaaggaaatatattttaccatacatttaaagttttggccaccacatgtatcacgggtcacttgaaattctttcagctatcagtaggctaatgtcaaaattgtttaaaaattcttgaaagaattttcctgagacaaattttaacttcttgtctatagttgtcagtattattctactatactgtacatgaaagtagcagtgtgaagtacaataattcatattcttcatatccttcttacacgactaagttgaattagtaaagttagattaaataaaacttaaatctcactctaggagttcagtggagaggttagagccagccacacttgaacctaataccctgcccttgacatctggaaacctctacatatttatataacgtgatacatttggataaacaacattgagattatgatgaaaacctacatattccatgtttggaagacccttggaagaggaaaattggattcccttaaacaaaagtgtttaagattgtaattaaaatgatagttgattttcaaaagcattaattttttttcattgtttttaactttgctttcatgaccatcctgccatccttgactttgaactaatgataaagtaatgatctcaaactatgacagaaaagtaatgtaaaatccatccaatctattatttctctaattatgcaattagcctcatagttattatccagaggacccaactgaactgaactaatccttctggcagattcaaatcgtttatttcacacgctgttctaatggcacttatcattagaatcttaccttgtgcagtcatcagaaattccagcgtactataatgaaaacatccttgttttgaaaacctaaaagacaggctctgtatatatatatacttaagaatatgctgacttcacttattagtcttagggatttattttcaattaatattaattttctacaaataattttagtgtcatttccatttggggatattgtcatatcagcacatattttctgtttggaaacacactgttgtttagttaagttttaaataggtgtattacccaagaagtaaagatggaaacgtt

SEQ ID NO: 12513 - protein, 790 aa, Homo sapiens
  ref <308>: DATABASE ACCESSION NUMBER: SWISS-Prot / P55285
  ref <309>: DATABASE ENTRY DATE: 2001-10-16
MRTYRYFLLLFWVGQPYPTLSTPLSKRTSGFPAKKRALELSGNSKNELNRSKRSWMWNQFFLLEEYTGSDYQYVGKLHSDQDRGDGSLKYILSGDGAGDLFIINENTGDIQATKRLDREEKPVYILRAQAINRRTGRPVEPESEFIIKIHDINDNEPIFTKEVYTATVPEMSDVGTFVVQVTATDADDPTYGNSAKVVYSILQGQPYFSVESETGIIKTALLNMDRENREQYQVVIQAKDMGGQMGGLSGTTTVNITLTDVNDNPPRFPQSTYQFKTPESSPPGTPIGRIKASDADVGENAEIEYSITDGEGLDMFDVITDQETQEGIITVKKLLDFEKKKVYTLKVEASNPYVEPRFLYLGPFKDSATVRIVVEDVDEPPVFSKLAYILQIREDAQINTTIGSVTAQDPDAARNPVKYSVDRHTDMDRIFNIDSGNGSIFTSKLLDRETLLWHNITVIATEINNPKQSSRVPLYIKVLDVNDNAPEFAEFYETFVCEKAKADQLIQTLHAVDKDDPYSGHQFSFSLAPEAASGSNFTIQDNKDNTAGILTRKNGYNRHEMSTYLLPVVISDNDYPVQSSTGTVTVRVCACDHHGNMQSCHAEALIHPTGLSTGALVAILLCIVILLVTVVLFAALRRQRKKEPLIISKEDIRDNIVSYNDEGGGEEDTQAFDIGTLRNPEAIEDNKLRRDIVPEALFLPRRTPTARDNTDVRDFINQRLKENDTDPTAPPYDSLATYAYEGTGSVADSLSSLESVTTDADQDYDYLSDWGPRFKKLADMYGGVDSDKDS

SEQ ID NO: 12514 - DNA, 564 bp, Rattus norvegicus; identical to SEQ ID NO: 1901
  ref <308>: DATABASE ACCESSION NUMBER: EMBL / D26500
  ref <309>: DATABASE ENTRY DATE: 1999-01-21

SEQ ID NO: 12515 - protein, 188 aa, Rattus norvegicus; identical to SEQ ID NO: 1902
  ref <308>: DATABASE ACCESSION NUMBER: SWISS-Prot / BAA05508
  ref <309>: DATABASE ENTRY DATE: 2001-12-01

SEQ ID NO: 12516 - DNA, 13748 bp, Homo sapiens; identical to SEQ ID NO: 1903
  ref <308>: DATABASE ACCESSION NUMBER: Refseq / NM_001372
  ref <309>: DATABASE ENTRY DATE: 2001-06-29

SEQ ID NO: 12517 - protein, 4486 aa, Homo sapiens
  ref <308>: DATABASE ACCESSION NUMBER: Refseq / NP_001363
  ref <309>: DATABASE ENTRY DATE: 2001-06-29
MRLAEERAALAAENADGEPGADRRLRLLGTYVAMSLRPAAGAWERCAGSAEAEQLLQAFLGRDAAEGPRPLLVVRPGPRGLAIRPGLEVGPESGLAGAKALFFLRTGPEPPGPDSFRGAVVCGDLPAAPLEHLAALFSEVVLPVLANEKNRLNWPHMICEDVRRHAHSLQCDLSVILEQVKGKTLLPLPAGSEKMEFADSKSETVLDSIDKSVIYAIESAVIKWSYQVQVVLKRESSQPLLQGENPTPKVELEFWKSRYEDLKYIYNQLRTITVRGMAKLLDKLQSSYFPAFKAMYRDVVAALAEAQDIHVHLIPLQRHLEALENAEFPEVKPQLRPLLHVVCLIWATCKSYRSPGRLTVLLQEICNLLIQQASNYLSPEDLLRSEVEESQRKLQVVSDTLSFFKQEFQDRRENLHTYFKENQEVKEWDFQSSLVFVRLDGFLGRLHVVEGLLKTALDFHKLGKVEFSGVRGNALSQQVQQMHEEFQEMYRLLSGSSSDCLYLQSTDFENDVSEFNQKVEDLDRRLGTIFIQAFDDAPGLEHAFKLLDIAGNLLERPLVARDTSDKYLVLIQMFNKDLDAVRMIYSQHVQEEAELGFSPVHKNMPTVAGGLRWAQELRQRIQGPFSNFGRITHPCMESAEGKRMQQKYEDMLSLLEKYETRLYEDWCRTVSEKSQYNLSQPLLKRDPETKEITINFNPQLISVLKEMSYLEPREMKHMPETAAAMFSSRDFYRQLVANLELMANWYNKVMKTLLEVEFPLVEEELQNIDLRLRAAEETLNWKTEGICDYVTEITSSIHDLEQRIQKTKDNVEEIQNIMKTWVTPIFKTKDGKRESLLSLDDRHDRMEKYYNLIKESGLKIHALVQENLGLFSADPTSNIWKTYVNSIDNLLLNGFFLAIECSLKYLLENTECKAGLTPIFEAQLSLAIPELVFYPSLESGVKGGFCDIVEGLITSIFRIPSLVPRLSPQNGSPHYQVDLDGIPDLANMRRTLMERVQRMMGLCCGYQSTFSQYSYLYVEDRKEVLGQFLLYGHILTPEEIEDHVEDGIPENPPLLSQFKVQIDSYETLYEEVCRLEPIKVFDGWMKIDIRPFKASLLNIIKRWSLLFKQHLVDHVTHSLANLDAFIKKSESGLLKKVEKGDFQGLVEIMGHLMAVKERQSNTDEMFEPLKQTIELLKTYEQELPETVFKQLEELPEKWNNIKKVAITVKQQVAPLQANEVTLLRQRCTAFDAEQQQFWEQFHKEAPFRFDSIHPHQMLDARHIEIQQMESTMASISESASLFEVNVPDYKQLRQCRKEVCQLKELWDTIGMVTSSIHAWETTPWRNINVEAMELECKQFARHIRNLDKEVRAWDAFTGLESTVWNTLSSLRAVAELQNPAIRERHWRQLMQATGVSFTMDQDTTLAHLLQLQLHHYEDEVRGIVDKAAKEMGMEKTLKELQTTWAGMEFQYEPHPRTNVPLLCSDEDLIEVLEDNQVQLQNLVMSKYVAFFLEEVSGWQKKLSTVDAVISIWFEVQRTWTHLESIFTGSEDIRAQLPQDSKRFEGIDIDFKELAYDAQKIPNVVQTTNKPGLYEKLEDIQGRLCLCEKALAEYLDTKRLAFPRFYFLSSSDLLDILSNGTAPQQVQRHLSKLFDNMAKMRFQLDASGEPTKTSLGMYSKEEEYVAFSEPCDCSGQVEIWLNHVLGHMKATVRHEMTEGVTAYEEKPREQWLFDHPAQVALTCTQIWWTTEVGMAFARLEEGYESAMKDYYKKQVAQLKTLITMLIGQLSKGDRQKIMTICTIDVHARDVVAKMIAQKVDNAQAFLWLSQLRHRWDDEVKHCFANICDAQFLYSYEYLGNTPRLVITPLTDRCYITLTQSLHLTMSGAPAGPAGTGKTETTKDLGRALGILVYVFNCSEQMDYKSCGNIYKGLAQTGAWGCFDEFNRISVEVLSVVAVQVKSIQDAIRDKKQWFSFLGEEISLNPSVGIFITMNPGYAGRTELPENLKSLFRPCAMVVPDFELICEIMLVAEGFIEAQSLARKFITLYQLCKELLSKQDHYDWGLRAIKSVLVVAGSLKRGDPDRPEDQVLMRSLRDFNIPKIVTDDMPIFMGLIGDLFPALDVPRRRDPNFEALVRKAIVDLKLQAEDNFVLKVVQLEELLAVRHSVFVVGGAGTGKSQVLRSLHKTYQIMKRRPVWTDLNPKAVTNDELFGIINPATGEWKDGLFSSIMRELANITHDGPKWILLDGDIDPMWIESLNTVMDDNKVLTLASNERIPLNPTMKLLFEISHLRTATPATVSRAGILYINPADLGWNPPVSSWIEKREIQTERANLTILFDKYLPTCLDTLRTRFKKIIPIPEQSMVQMVCHLLECLLTTEDIPADCPKEIYEHYFVFAAIWAFGGAMVQDQLVDYRAEFSKWWLTEFKTVKFPSQGTIFDYYIDPETKKFEPWSKLVPQFEFDPEMPLQACLVHTSETIRVCYFMERLMARQRPVMLVGTAGTGKSVLVGAKLASLDPEAYLVKNVPFNYYTTSAMLQAVLEKPLEKKAGRNYGPPGNKKLIYFIDDMNMPEVDAYGTVQPHTIIRQHLDYGHWYDRSKLSLKEITNVQYVSCMNPTAGSFTINPRLQRHFSVFVLSFPGADALSSIYSIILTQHLKLGNFPASLQKSIPPLIDLALAFHQKIATTFLPTGIKFHYIFNLRDFANIFQGILFSSVECVKSTWDLIRLYLHESNRVYRDKMVEEKDFDLFDKIQTEVLKKTFDDIEDPVEQTQSPNLYCHFANGIGEPKYMPVQSWELLTQTLVEALENHNEVNTVMDLVLFEDAMRHVCHINRILESPRGNALLVGVGGSGKQSLTRLAAFISSMDVFQITLRKGYQIQDFKMDLASLCLKAGVKNLNTVFLMTDAQVADERFLVLINDLLASGEIPDLYSDDEVENIISNVRNEVKSQGLVDNRENCWKFFIDRIRRQLKVTLCFSPVGNKLRVRSRKFPAIVNCTAIHWFHEWPQQALESVSLRFLQNTEGIEPTVKQSISKFMAFVHTSVNQTSQSYLSNEQRYNYTTPKSFLEFIRLYQSLLHRHRKELKCKTERLENGLLKLHSTSAQVDDLKAKLAAQEVELKQKNEDADKLIQVVGVETDKVSREKAMADEEEQKVAVIMLEVKQKQKDCEEDLAKAEPALTAAQAALNTLNKTNLTELKSFGSPPLAVSNVSAAVMVLMAPRGRVPKDRSWKAAKVTMAKVDGFLDSLINFNKENIHENCLKAIRPYLQDPEFNPEFVATKSYAAAGLCSWVINIVRFYEVFCDVEPKRQALNKATADLTAAQEKLAAIKAKIAHLNENLAKLTARFEKATADKLKCQQEAEVTAVTISLANRLVGGLASENVRWADAVQNFKQQERTLCGDILLITAFISYLGFFTKKYRQSLLDRTWRPYLSQLKTPIPVTPALDPLRMLMDDADVAAWQNEGLPADRMSVENATILINCERWPLMVDPQLQGIKWIKNKYGEDLRVTQIGQKGYLQIIEQALEAGAVVLIENLEESIDPVLGPLLGREVIKKGRFIKIGDKECEYNPKFRLILHTKLANPHYQPELQAQATLINFTVTRDGLEDQLLAAVVSMERPDLEQLKSDLTKQQNGFKITLKTLEDSLLSRLSSASGNFLGETVLVENLEITKQTAAEVEKKVQEAKVTEVKINEAREHYRPAAARASLLYFIMNDLSKIHPMYQFSLKAFSIVFQKAVERAAPDESLRERVANLIDSITFSVYQYTIRGLFECDKLTYLAQLTFQILLMNREVNAVELDFLLRSPVQTGTASPVEFLSHQAWGAVKVLSSMEEFSNLDRDIEGSAKSWKKFVESECPEKEKLPQEWKNKTALQRLCMLRAMRPDRMTYALRDFVEEKLGSKYVVGRALDFATSFEESGPATPMFFILSPGVDPLKDVESQGRKLGYTFNNQNFHNVSLGQGQEVVAEAALDLAAKKGHWVILQNIHLVAKWLSTLEKKLEEHSENSHPEFRVFMSAEPAPSPEGHIIPQGILENSIKITNEPPTGMHANLHKALDNFTQDTLEMCSRETEFKSILFALCYFHAVVAERRKFGPQGWNRSYPFNTGDLTISVNVLYNFLEANAKVPYDDLRYLFGEIMYGGHITDDWDRRLCRTYLGEFIRPEMLEGELSLAPGFPLPGNMDYNGYHQYIDAELPPESPYLYGLHPNAEIGFLTQTSEKLFRTVLELQPRDSQARDGAGATREEKVKALLEEILERVTDEFNIPELMAKVEERTPYIVVAFQECGRMNILTREIQRSLRELELGLKGELTMTSHMENLQNALYFDMVPESWARRAYPSTAGLAAWFPDLLNRIKELEAWTGDFTMPSTVWLTGFFNPQSFLTAIMQSTARKNEWPLDQMALQCDMTKKNREEFRSPPREGAYIHGLFMEGACWDTQAGIITEAKLKDLTPPMPVMFIKAIPADKQDCRSVYSCPVYKTSQRGPTYVWTFNLKTKENPSKWVLAGVALLLQI

SEQ ID NO: 12518 - DNA, 1411 bp, Rattus norvegicus
  ref <308>: DATABASE ACCESSION NUMBER: EMBL / D49955
  ref <309>: DATABASE ENTRY DATE: 2000-02-01
gaggaatcaacttccctgatggcggttcaagcatgcgcgttgtctctacggctggggctgtggatgtccctcttgctgccggtactgccgggggcgggggcgagagctgctggagcgcggtggagcggggagggtaccacgcctcacctccagagcatcttcctgggccgctgtgcggagtacaccacgctgctgagccttgagccggggaacaaaaactgcacagccatctgggaggccttcaaggtggtgctggacaaggatccctgctctgtgctcccctcagactatgatctcttcattaacctgtccaggcacgccattcctagggacaagtcactgttctgggaaaataaccacctactggttatgagctatgcagagaacacccgccgccttatgcccctgtgtgacgttctgtatggcaaggttggagatttcttgagctggtgtcgacaggaaaatgcctctggacttgattaccagtcctgccccacagcagaagactgtgaaaacaatgccgtggatgcctattggaaaagtgcatccatgcagtattcaagagacagttcaggagtgatcaacgtcatgctgaatggctcggagccaaaaggagcctatcccacgaaagggttttttgcagattttgaaatcccatacttgcaaaaggataaaatcacaagaattgagatctgggtcatgcatgaagttgggggaccccatgtggaatcctgcggcgaaggcagtgttaagatcctggaagacagactggaggccttggggttccagcacagctgtatcaatgactacccgccggtgaagttcttaatgtgtgtggaccacagcactcaccccgactgtgccatgaactcagcctcagcgtctatgtggagggagagcccagctcttcatgcaataggagacatcagcctcatcatctctctcttagtggctttggcttcaagttctcaagcatgactagaaaatcaccacagcgttctaacagaagccagtcttgcggcttcccttgagcagtccactgttctgtgtaaactgagaaagcccaccgtctcaagacagttccttctaggaaaacagtgtacccaggcggtaatccaattatatttgcattcgtgattcgagaaacgaggcatttatctagtcctgcttggcaggcagaagttgctactggggagttaaagctattctttcttctttgataatgatacagagtactgagccctggagtgtggtataatcttttataattaagtgtatttttgtaagtatctgtattttatattttctgtattttcttgtgtttcaaaagatacaatttatgcttgtcaagagtttccattacatgtaccgtatataaaggtatacaaatacagatattgtgcaaagacgt

SEQ ID NO: 12519 - protein, 319 aa, Rattus norvegicus
  ref <308>: DATABASE ACCESSION NUMBER: SWISS-Prot / BAA08710
  ref <309>: DATABASE ENTRY DATE: 2001-10-16
MAVQACALSLRLGLWMSLLLPVLPGAGARAAGARWSGEGTTPHLQSIFLGRCAEYTTLLSLEPGNKNCTAIWEAFKVVLDKDPCSVLPSDYDLFINLSRHAIPRDKSLFWENNHLLVMSYAENTRRLMPLCDVLYGKVGDFLSWCRQENASGLDYQSCPTAEDCENNAVDAYWKSASMQYSRDSSGVINVMLNGSEPKGAYPTKGFFADFEIPYLQKDKITRIEIWVMHEVGGPHVESCGEGSVKILEDRLEALGFQHSCINDYPPVKFLMCVDHSTHPDCAMNSASASMWRESPALHAIGDISLIISLLVALASSSQA

SEQ ID NO: 12520 - DNA, 1786 bp, Rattus norvegicus; identical to SEQ ID NO: 2123
  ref <308>: DATABASE ACCESSION NUMBER: EMBL / D63761
  ref <309>: DATABASE ENTRY DATE: 2000-02-01

SEQ ID NO: 12521 - protein, 494 aa, Rattus norvegicus; identical to SEQ ID NO: 2124
  ref <308>: DATABASE ACCESSION NUMBER: SWISS-Prot / P56522
  ref <309>: DATABASE ENTRY DATE: 2001-10-16

SEQ ID NO: 12522 - DNA, 1830 bp, Homo sapiens; identical to SEQ ID NO: 2125
  ref <308>: DATABASE ACCESSION NUMBER: EMBL / J03826
  ref <309>: DATABASE ENTRY DATE: 1997-02-17

SEQ ID NO: 12523 - protein, 491 aa, Homo sapiens; identical to SEQ ID NO: 2126
  ref <308>: DATABASE ACCESSION NUMBER: SWISS-Prot / P22570
  ref <309>: DATABASE ENTRY DATE: 2002-06-15

SEQ ID NO: 12524 - DNA, 2169 bp, Rattus norvegicus; identical to SEQ ID NO: 2143
  ref <308>: DATABASE ACCESSION NUMBER: EMBL / D64046
  ref <309>: DATABASE ENTRY DATE: 1999-01-21

SEQ ID NO: 12525 - protein, 722 aa, Rattus norvegicus; identical to SEQ ID NO: 2144
  ref <308>: DATABASE ACCESSION NUMBER: SWISS-Prot / BAA10926
  ref <309>: DATABASE ENTRY DATE: 2002-06-15

SEQ ID NO: 12526 - DNA, 3201 bp, Homo sapiens; identical to SEQ ID NO: 2145
  ref <308>: DATABASE ACCESSION NUMBER: Refseq / NM_005027
  ref <309>: DATABASE ENTRY DATE: 2000-11-01

SEQ ID NO: 12527 - protein, 728 aa, Homo sapiens; identical to SEQ ID NO: 2146
  ref <308>: DATABASE ACCESSION NUMBER: Refseq / NP_005018
  ref <309>: DATABASE ENTRY DATE: 2000-11-01

SEQ ID NO: 12528 - DNA, 1952 bp, Rattus norvegicus; identical to SEQ ID NO: 2175
  ref <308>: DATABASE ACCESSION NUMBER: EMBL / D82074
  ref <309>: DATABASE ENTRY DATE: 1999-01-21

SEQ ID NO: 12529 - protein, 357 aa, Rattus norvegicus; identical to SEQ ID NO: 2176
  ref <308>: DATABASE ACCESSION NUMBER: SWISS-Prot / BAA11535
  ref <309>: DATABASE ENTRY DATE: 2002-06-15

SEQ ID NO: 12530 - DNA, 2502 bp, Homo sapiens; identical to SEQ ID NO: 2177

SEQ ID NO: 12531 - protein, 356 aa, Homo sapiens; identical to SEQ ID NO: 2178

SEQ ID NO: 12532 - DNA, 2877 bp, Rattus norvegicus
  ref <308>: DATABASE ACCESSION NUMBER: EMBL / D82883
  ref <309>: DATABASE ENTRY DATE: 2000-04-14
cgcgggccttgccgggttccttccgcacctttcctacggtgaccatggctagctgctgcctccttggggccggaccatgggcggggacggttgccggggtattaaagggaagctcgcccgcggccagactgcctgtacccgtgcggcggcgtccctgcagccaagtcttgccggaggacgtgccgtgggagcccgtgtctggcggactggagcattaaggagtaaagttgctgctttaaagacatcatcttctggcttccattaagtccaggacatgtgctgtattcctgtctttgttcctccataagtgatgtgtgtctgtcttcagaagcaccctctgagtaacagtgattggtttagaaaaacctcttgaccaaaggctactccagacaggaagtaactcaagcaggctcaggagagcaggaagtgagaagacagatgctgagttaatgaccagcacactaacctgtttgagttgctcagggaagtaaagcatctgtctccagaatgtcttcagaaaataaagagcagcataatctttcaccaagggacttacctgaagaagcctatggcttcccacctgagctccccctgggggctcaaagaggatcaagcactgacttaaggcagtttgagcccagtgatcggagaagagcttttcgtaggatccacatggaactccatgagaaaccagatactaacatcagacagcttgtcatgagaaagcttcagaagagttgccagtgtaatgcaaccaaaatcagaaataggatttttgatttttttcctgttttgaggtggctcccaaaatatgatctgaagaaaaacattttaggtgacatgatgtctggcctgattgtgggtatattgttggtgccccagtctattgcttactccctgttggctggccaggaacctatctatggtctgtacacatcattttttgccagcattatttacttcctgtttggtacctcccgccacatctctgtgggcatttttggaatactgtgccttatgattggtgaggtagttgaccgagaactacataaagcctgccctgacattgatactacatcatcttccatagcaatgttttcaaatggatgtgtggtagtaaaccatacattagacggactctgtgacaaaagctgttatgcaattaaaattggcagcactgtgacattcatggctggagtttatcaggtagccatgggcttctttcaagtgggctttgtgtctgtctacctctcagatgccttgctgagcgggtttgtcactggtgcctccttcaccatcctcacgtctcaggccaagtacctcctggggctgagccttcctcggagcaatggtgtaggctcagtcattactacctggatccacatcttcagaaatattcataagaccaacatctgtgacctcatcaccagccttttgtgtctcctggtccttgtgccaaccaaagaactcaacgaatacttcaagtccaagctcccggcaccaattccaactgagctcattgtcgttgtggcagccacattggcttctcattttggaaaactcaatgagaattacaattccagtattgccgggcaaattcccaccgggtttatgccaccccaagcgccagactggagcctcattcctaatgtggctgttgatgccatagctatttctatcattggttttgctatcactgtatcactttctgagatgtttgccaagaaacatggctacacggtgaaagccaatcaggaaatgtatgccattggcttttgcaatatcataccctccttcttccactgcataactactagtgccgcccttgcaaagacactggttaaagagtcaacaggttgccagacccaactgtccgctatagtgacatccctcgttcttctgttggtccttctgctaatagctcccttattctattccctccaaaaatgtgtccttggtgtgatcaccattgtaaatctccggggtgcacttctgaaatttagagacctgccaaagatgtggaggctcagcagaatggacacagttatctggtttgtgacgatgctgtcctctgctctgttaagcactgaaataggcctgctcgttggggtttgtttttcaatgttttgtgtgattctccgtactcagatgccaaagatttcactgcttggtttggaagaagaatctgaaatcttcgagtccatctccacttacaagaaccttcggagtaagtcaggcatcaaggttttccgcttcatagcccctctctactacataaacaaagaatgctttaaatcagctttgtacaagaaaacgctaaacccagtcttggtaaaagcagcctggaaaaaggcagcaaaaaggaaactgaaagaggaaacagtgactttccatggggacccggatgaagtctcaatgcagctttcccatgatcccttggagctgcacaccgttgtgattgactgtagtgcaatacagtttttggatacagcagggatccacacactgaaagaagttcgccgggattatgaagccattggtatccaggttttactggctcagtgcaatccttctgtgagggattccttagccaaaggagaatattgcaaaaaggaagaagaaaatcttctcttctacagtttgtctgaagcagtagcttttgcagaagagtctcagaaggagaaaggagtgtgtgtggtcaatggtttgagtctttctggtgactgagaaaattaatgagtctctctggtgactgggaaagctaatagaaggaagaagagtgtcttgccagtttcagtgtgcggcattttctcctgtgaaggaggaagcagtgtacacgtgagatggcttcctttgcagctagcctttcgatagtct

SEQ ID NO: 12533 - protein, 739 aa, Rattus norvegicus
  ref <308>: DATABASE ACCESSION NUMBER: SWISS-Prot / O70531
  ref <309>: DATABASE ENTRY DATE: 2002-06-15
MSSENKEQHNLSPRDLPEEAYGFPPELPLGAQRGSSTDLRQFEPSDRRRAFRRIHMELHEKPDTNIRQLVMRKLQKSCQCNATKIRNRIFDFFPVLRWLPKYDLKKNILGDMMSGLIVGILLVPQSIAYSLLAGQEPIYGLYTSFFASIIYFLFGTSRHISVGIFGILCLMIGEVVDRELHKACPDIDTTSSSIAMFSNGCVVVNHTLDGLCDKSCYAIKIGSTVTFMAGVYQVAMGFFQVGFVSVYLSDALLSGFVTGASFTILTSQAKYLLGLSLPRSNGVGSVITTWIHIFRNIHKTNICDLITSLLCLLVLVPTKELNEYFKSKLPAPIPTELIVVVAATLASHFGKLNENYNSSIAGQIPTGFMPPQAPDWSLIPNVAVDAIAISIIGFAITVSLSEMFAKKHGYTVKANQEMYAIGFCNIIPSFFHCITTSAALAKTLVKESTGCQTQLSAIVTSLVLLLVLLLIAPLFYSLQKCVLGVITIVNLRGALLKFRDLPKMWRLSRMDTVIWFVTMLSSALLSTEIGLLVGVCFSMFCVILRTQMPKISLLGLEEESEIFESISTYKNLRSKSGIKVFRFIAPLYYINKECFKSALYKKTLNPVLVKAAWKKAAKRKLKEETVTFHGDPDEVSMQLSHDPLELHTVVIDCSAIQFLDTAGIHTLKEVRRDYEAIGIQVLLAQCNPSVRDSLAKGEYCKKEEENLLFYSLSEAVAFAEESQKEKGVCVVNGLSLSGD

SEQ ID NO: 12534 - DNA, 2832 bp, Homo sapiens
  ref <308>: DATABASE ACCESSION NUMBER: EMBL / U14528
  ref <309>: DATABASE ENTRY DATE: 2000-03-04
aggaagctgaaccatctatctccagaaatgtcttcagaaagtaaagagcaacataacgtttcacccagagactcagctgaaggaaatgacagttatccatctgggatccatctggaacttcaaagggaatcaagtactgacttcaagcaatttgagaccaatgatcaatgcagaccttatcataggatccttattgagcgtcaagagaaatcagatacaaacttcaaggagtttgttattaaaaagctgcagaagaattgccagtgcagtccagccaaagccaaaaatatgattttaggtttccttcctgttttgcagtggctcccaaaatacgacctaaagaaaaacattttaggggatgtgatgtcaggcttgattgtgggcatattattggtgccccagtccattgcttattccctgctggctggccaagaacctgtctatggtctgtacacatctttttttgccagcatcatttattttctcttgggtacctcccgtcacatctctgtgggcatttttggagtactgtgccttatgattggtgagacagttgaccgagaactacagaaagctggctatgacaatgcccatagtgctccttccttaggaatggtttcaaatgggagcacattattaaatcatacatcagacaggatatgtgacaaaagttgctatgcaattatggttggcagcactgtaacctttatagctggagtttatcaggtagcgatgggcttctttcaagtgggttttgtttctgtctacctctcagatgccttgctgagtggatttgtcactggtgcctccttcactattcttacatctcaggccaagtatcttcttgggctcaaccttcctcggactaatggtgtgggctcactcatcactacctggatacatgtcttcagaaacatccataagaccaatctctgtgatcttatcaccagccttttgtgccttttggttcttttgccaaccaaagaactcaatgaacacttcaaatccaagcttaaggcaccgattcctattgaacttgttgttgttgtagcagccacattagcctctcattttggaaaactacatgaaaattataattctagtattgctggacatattcccactgggtttatgccacccaaagtaccagaatggaacctaattcctagtgtggctgtagatgcaatagctatttccatcattggttttgctatcactgtatcactttctgagatgtttgccaagaaacatggttacacagtcaaagcaaaccaggaaatgtatgccattggcttttgtaatatcatcccttccttcttccactgttttactactagtgcagctcttgcaaagacattggttaaagaatcaacaggctgccatactcagctttctggtgtggtaacagccctggttcttttgttggtcctcctagtaatagctcctttgttctattcccttcaaaaaagtgtccttggtgtgatcacaattgtaaatctacggggagcccttcgtaaatttagggatcttcccaaaatgtggagtattagtagaatggatacagttatctggtttgttactatgctgtcctctgcactgctaagtactgaaataggcctacttgttggggtttgtttttctatattttgtgtcatcctccgcactcagaagccaaagagttcactgcttggcttggtggaagagtctgaggtctttgaatctgtgtctgcttacaagaaccttcagactaagccaggcatcaagattttccgctttgtagcccctctctactacataaacaaagaatgctttaaatctgctttatacaaacaaactgtcaacccaatcttaataaaggtggcttggaagaaggcagcaaagagaaagatcaaagaaaaagtagtgactcttggtggaatccaggatgaaatgtcagtgcaactttcccatgatcccttggagctgcatactatagtgattgactgcagtgcaattcaatttttagatacagcagggatccacacactgaaagaagttcgcagagattatgaagccattggaatccaggttctgctggctcagtgcaatcccactgtgagggattccctaaccaacggagaatattgcaaaaaggaagaagaaaaccttctcttctatagtgtgtatgaagcgatggcttttgcagaagtatctaaaaatcagaaaggagtatgtgttcccaatggtctgagtcttagtagtgattaattgagaaggtagatagaagaatgtctagccaataggttaaaatttcaagtgtccaacatttcccagttccacagtgggaaattttgcacacttgaaattttaaccaagtggctagatattattcctcctttgaagctaatggcatttgtatatacacactgcagcagagcttgtagctggacagagtcaaaaagaagaaaatacggtttcaggctttcttgcagatatgaagtattcttggaatgcaataagtatgtattgaactgtactgtaaagtagctccaaaacttaattactctcctgttttaggggttatacatttggactgtgcattctccaagagatgaagcggtgaagttgggatttacattggaagtgctgtagacttctttatgtggctcagtggagagagggaaagaatgttgcacctgctctagtaccataggtcaagaggcttctggatcacaaagtcataactagacaggtttgttcttgtagttttctatccccagtctttgctccccagatggcagtagtttttagtaggaaagtgccattcctgtccttaaggcacagtctcatcag

SEQ ID NO: 12535 - protein, 739 aa, Homo sapiens
  ref <308>: DATABASE ACCESSION NUMBER: SWISS-Prot / P50443
  ref <309>: DATABASE ENTRY DATE: 2002-06-15
MSSESKEQHNVSPRDSAEGNDSYPSGIHLELQRESSTDFKQFETNDQCRPYHRILIERQEKSDTNFKEFVIKKLQKNCQCSPAKAKNMILGFLPVLQWLPKYDLKKNILGDVMSGLIVGILLVPQSIAYSLLAGQEPVYGLYTSFFASIIYFLLGTSRHISVGIFGVLCLMIGETVDRELQKAGYDNAHSAPSLGMVSNGSTLLNHTSDRICDKSCYAIMVGSTVTFIAGVYQVAMGFFQVGFVSVYLSDALLSGFVTGASFTILTSQAKYLLGLNLPRTNGVGSLITTWIHVFRNIHKTNLCDLITSLLCLLVLLPTKELNEHFKSKLKAPIPIELVVVVAATLASHFGKLHENYNSSIAGHIPTGFMPPKVPEWNLIPSVAVDAIAISIIGFAITVSLSEMFAKKHGYTVKANQEMYAIGFCNIIPSFFHCFTTSAALAKTLVKESTGCHTQLSGVVTALVLLLVLLVIAPLFYSLQKSVLGVITIVNLRGALRKFRDLPKMWSISRMDTVIWFVTMLSSALLSTEIGLLVGVCFSIFCVILRTQKPKSSLLGLVEESEVFESVSAYKNLQTKPGIKIFRFVAPLYYINKECFKSALYKQTVNPILIKVAWKKAAKRKIKEKVVTLGGIQDEMSVQLSHDPLELHTIVIDCSAIQFLDTAGIHTLKEVRRDYEAIGIQVLLAQCNPTVRDSLTNGEYCKKEEENLLFYSVYEAMAFAEVSKNQKGVCVPNGLSLSSD

SEQ ID NO: 12536 - DNA, 4153 bp, Rattus norvegicus
  ref <308>: DATABASE ACCESSION NUMBER: EMBL / D83349
  ref <309>: DATABASE ENTRY DATE: 1999-01-21
ctcatgcttggcggcgcgggccaagccccggagcatggaccagaggcaccgcagcggtactgcgtcacatggtgacctcagcctcagggatgccgggctggactgggagggggcgcggccgcacccgggcatggacacccggtcctggcccgcgcccccctcgctgaagccccaggtccagtcactaggcagcccggccgctccccgaggttcccaatggatctggatgacccctaatcccagaaagacttcaagatccttttgctcccactgaccacaccatctgggtacagggaccatggcacaagccctactcaggagcagctactgggctgcctagtgactggacctggggcttcagcgaggggggcgcgggccaggaccgggtgtccatgcccgggtgcggccgcgccccctcccagtccagcccggcatccctgaggctgaggtcaccatgtgacgcagtaccgctgcggtgcctctggtccatgctccggggcttggcccgcgccgccaagcatgaggccacggccagcaggggcgctccgggccggggctgcgctgtcgcctgtgctgctgcttctgctactgctacagctgctggggcatctgtgggccgcaagcacacctgccccatcctccttgtcacctgggactcagcaggacaaccagctgggtgcaggccgagtgaagcgcggttgggtgtggaaccaattcttcgtggtggaggagtacacggggacagaacccctgtacgtgggcaagatccactcggattctgacgaaggcgacgggaccatcaagtacaccatctcgggcgagggtgcagggaccatcttcctgatcgacgagctgacaggtgacatccacgccacggagcgcctggaccgggagcagaaaaccttctacacactccgggcccaagccagggatcgagccaccaaccgtctgctggagccggagtcagagttcatcatcaaagtgcaggacatcaacgacagtgaaccacgctttctccacggcccctacatcggcagtgtggccgagctgtcacctacaggcacgtccgtgatgcaggtgatggcctctgatgcagatgaccccacttacggcagcagtgcccggctggtgtacagcgtcctggacggcgagcaccacttcacagtggaccccaagacaggtgtgatccggacagcagtgcctgacctcgaccgtgagagccaggaacgctacgaggtggtaatccaagccacggacatggcaggccagctgggcggcctctcaggctccactacagtgaccatcgtggttactgatgtcaacgacaacccaccccgctttccacaaaagatgtaccagttcagcatacaggagtcagcgcccatcggcacagccgtaggccgagtgaaggcggaggactcagatgtgggcgagaacacagacatgacttatcacctgagagaagaaagtggcagtggaggagacgcattcaaggtcaccacggacagcgacactcaggaggccatcatagtggtgcagaagcacctggacttcgagtcgcagcaggtccacacagtggtactggaagccctcaacaagtttgtggacccccgcttcgccgacctgggcacattccgagaccaggcaatcgtgcgcgtggccgtgaccgatgtggatgagccccccgagttccggccaccctccggcctactggaggtgcaggaggacgcgcaggtgggctccctggtcggcgtggtgacggcgcgggaccccgacgccgccaaccggcccgtccggtacgccattgaccgagactcggatttggagcagatcttcgacatcgatgcggacactggcgccatcgtgactggcaaggggctggaccgtgaaaccgccggctggcacaacattactgtgttggccatggaagcagacaatcatgctcagctgtctcgggcatccctacggatccgaatcctggatgtgaatgacaatcccccagagctggccacaccctacgaggccgctgtgtgtgaagacgccaagccaggccagctcattcaaaccatcagtgtggtggacagagacgaaccacagggcggccaccgcttctatttccgcctggtaccagaggaacccagcaaccctcacttctctctgctggacatcgaagataacacggctgcggtgcacacccagcatgtgggcttcaaccggcaagagcaggatgtgttcctcctgcccatccttgttgtggacagcgggccacccaccctgagcagcacaggcaccctcaccatccgtatctgcggctgtgacagttccggtaccatccagtcctgcaacaccactgcctttgtcatggctgcctccctcagcccgggagcactcatcgctctcttggtctgtgtcctcatcctggtcgtgctggctttgctgattctcaccctcaggcggcaccacaagagccacctgagctcagatgtggatgaagacatgcgggacaacgtgatcaaatacaccctgggatcaggacatcgagggacaagcaacaaagaggatcatcagtgtccagctagtctctctctggggttcaaaccttgaatcaatgccctagtgagggggcactggccatgacccctcaacctttgctctgcttgtatcttgagtctgagtccttccctgtacatctgtgctcgtgttcatcagctagtgaactgaagtgcttccctccccgaggggggtcgtcccttgtgactgaccatgttgtcctaacaatgtcctgagcagaagggtccccaatgggaacctctcaggaggggggtttggggcggcgggggggggaccagcatcttgctggcaactgtgggtggggtggggtgcttccttctggaatgagcatgtggctgacccccaaaggcatgccccctccccccccacccaccttcttggagatgtcccttccttttggggtagtggggacattaggagcaacctcctagggttgttgtgagaattaaatgaactgtagcagcctgaggcagggctgggcagaaacctcagcacatgtttgttgaaaggtttgcaggtggatcaagtcacccaactcacagtctcatgtgtctcgtctattctcctgcagactcctgtagcccctatgcccagggctcttcttgctccagctaggggctcctaaagacaacaggccgtccaggagactttgagtaaggacatgagtaatgtgtgtggccatttccagagcactttctatgtaatatgaccgtgttattcctatgtaattcgtgtgtgtcaagggggtagcctcgtgtctagagaggggtgaattggcattgatttttttttattagttttcatgacttttaaagaggtaggtgggaaagagaactgggagagccccacctcactcgtggggttgaggacaatggactcttttgctacagtggctaagacgggggtggggacaaagtcggacatggttggcattgtgatgacctctcatggtccggtttcccccgtccctgcctaacgttttttattatcaaacatttcacaacggggaaatttcttgcttcccaagggtggtcttggggagctgctgggaatcaggggagggggtggtggtggcccaagtctggtagcatgtgctgacctcacctcttagcaacggtgtgaccttaaacaagtcatttagcttccaagtttcagttcctttcacacctagatagacatttaaaaagaaaaaaaaaaaggaaagagaaagtggggggtggggggaggtggggtggtggggggtggggggaaaacagctggtctaccccacagagtgcttctgaagaccaaacgatgtaactcacaagaaagtgccttgtaaatcgcccagaaattgccaaatacttactaaccaaggaggctgtccctaccgcccactggccagcccgaggctcactgttgtgagcacacagtaggggctgggtatttgtgctcgataaataatttccagagttagaaagaaaaaaaaagttcattcaacaaacattttctgagacgctgaccatgtgccccatgcaccaggctatggctgaggtacaaagataatgacgaacagtctctttcggaggctaattaggacccg

SEQ ID NO: 12537 - protein, 694 aa, Rattus norvegicus
  ref <308>: DATABASE ACCESSION NUMBER: SWISS-Prot / BAA11895
  ref <309>: DATABASE ENTRY DATE: 2002-06-15
MRPRPAGALRAGAALSPVLLLLLLLQLLGHLWAASTPAPSSLSPGTQQDNQLGAGRVKRGWVWNQFFVVEEYTGTEPLYVGKIHSDSDEGDGTIKYTISGEGAGTIFLIDELTGDIHATERLDREQKTFYTLRAQARDRATNRLLEPESEFIIKVQDINDSEPRFLHGPYIGSVAELSPTGTSVMQVMASDADDPTYGSSARLVYSVLDGEHHFTVDPKTGVIRTAVPDLDRESQERYEVVIQATDMAGQLGGLSGSTTVTIVVTDVNDNPPRFPQKMYQFSIQESAPIGTAVGRVKAEDSDVGENTDMTYHLREESGSGGDAFKVTTDSDTQEAIIVVQKHLDFESQQVHTVVLEALNKFVDPRFADLGTFRDQAIVRVAVTDVDEPPEFRPPSGLLEVQEDAQVGSLVGVVTARDPDAANRPVRYAIDRDSDLEQIFDIDADTGAIVTGKGLDRETAGWHNITVLAMEADNHAQLSRASLRIRILDVNDNPPELATPYEAAVCEDAKPGQLIQTISVVDRDEPQGGHRFYFRLVPEEPSNPHFSLLDIEDNTAAVHTQHVGFNRQEQDVFLLPILVVDSGPPTLSSTGTLTIRICGCDSSGTIQSCNTTAFVMAASLSPGALIALLVCVLILVVLALLILTLRRHHKSHLSSDVDEDMRDNVIKYTLGSGHRGTSNKEDHQCPASLSLGFKP

SEQ ID NO: 12538 - DNA, 1072 bp, Rattus norvegicus; identical to SEQ ID NO: 2211
  ref <308>: DATABASE ACCESSION NUMBER: EMBL / D84418
  ref <309>: DATABASE ENTRY DATE: 1997-04-25

SEQ ID NO: 12539 - protein, 209 aa, Rattus norvegicus; identical to SEQ ID NO: 2212
  ref <308>: DATABASE ACCESSION NUMBER: SWISS-Prot / P52925
  ref <309>: DATABASE ENTRY DATE: 2002-06-15

SEQ ID NO: 12540 - DNA, 1301 bp, Homo sapiens
  ref <308>: DATABASE ACCESSION NUMBER: EMBL / X62534
  ref <309>: DATABASE ENTRY DATE: 1991-11-29
aatacgactcactataggggagaccggaattcgagctcggtacccggggatcctctagagatccctcgacctcgagatccattgtgctctaaagttgcgttagagataaaccagttcacgccggagccccgtgagggaagcgtctccgttgggtccggccgctctgcgggactctgaggaaaagctcgcaccaggtggacgcggatctgtcaacatgggtaaaggagaccccaacaagccgcggggcaaaatgtcctcgtacgccttcttcgtgcagacctgccgggaagagcacaagaagaaacacccggactcttccgtcaatttcgcggaattctccaagaagtgttcggagagatggaagaccatgtctgcaaaggagaagtcgaagtttgaagatatggcaaaaagtgacaaagctcgctatgacagggagatgaaaaattacgttcctcccaaaggtgataagaaggggaagaaaaaggaccccaatgctcctaaaaggccaccatctgccttcttcctgttttgctctgaacatcgcccaaagatcaaaagtgaacaccctggcctatccattggggatactgcaaagaaattgggtgaaatgtggtctgagcagtcagccaaagataaacaaccatatgaacagaaagcagctaagctaaaggagaaatatgaaaaggatattgctgcatatcgtgccaagggcaaaagtgaagcaggaaagaagggccctggcaggccaacaggctcaaagaagaagaacgaaccagaagatgaggaggaggaggaggaagaagaagatgaagatgaggaggaagaggatgaagatgaagaataaatggctatcctttaatgatgcgtgtggaatgtgtgtgtgtgctcaggcaattattttgctaagaatgtgaattcaagtgcagctcaatactagcttcagtataaaaactgtacagatttttgtatagctgataagattctctgtagagaaaatacttttaaaaaatgcaggttgtagctttttgatgggctactcatacagttagattttacagcttctgatgttgaatgttcctaaatatttaatggtttttttaatttctgtgtgtatggtagcacagcaaacttgtaggaattagtatcaatagtaaattttgggttttttaggatgttgcatttcgtttttttaaaaaaaattttgtaataaaattatgtatattatttctattgtctttgtcttaatatgctaagttaattttcactttaaaaaagccatttgaagaccaaaaaaaaaaaaa

SEQ ID NO: 12541 - protein, 210 aa, Homo sapiens
  misc_feature (1)..(210): Xaa=Unknown amino acid
MGKGDPNKPRGKMSSYAFFVQTCREEHKKKHPDSSVNFAEFSKKCSERWKTMSAKEKSKFEDMAKSDKARYDREMKNYVPPKGDKKGKKKDPNAPKRPPSAFFLFCSEHRPKIKSEHPGLSIGDTAKKLGEMWSEQSAKDKQPYEQKAAKLKEKYEKDIAAYRAKGKSEAGKKGPGRPTGSKKKNEPEDEEEEEEEEDEDEEEEDEDEEX

SEQ ID NO: 12542 - DNA, 443 bp, Rattus norvegicus
  ref <308>: DATABASE ACCESSION NUMBER: EMBL / D84480
  ref <309>: DATABASE ENTRY DATE: 1997-06-01
agatcaacacaaatgtgtatttcaatatccgaaatatactcagaaacacattttgcataatgataaacagtgtacaatcttttaacaaaaccccagcaaaatggaaaccaggcagtatacataactttcacccaagtcttgccagtggtttcaagaaagccaaacaagaagaagcccagacaccatattttttaaaaggagctctggcaaagttttattaaaggagaactttcttgtttacttctcaccagtctgttctggcatgcttctaataatatcggaatcacctgggtcaatgatagccagtgtgcatactctgtagtatttcccacacgctgtgcccaattccatgttattgccactgtagtgatggacaccagttttagccaacatggatagtattctattcaaattccccaactggacgtggtgggaagaaacat

SEQ ID NO: 12543 - DNA, 524 bp, Homo sapiens
  ref <308>: DATABASE ACCESSION NUMBER: Refseq / NM_000989
  ref <309>: DATABASE ENTRY DATE: 2002-11-05
cctttctcgttccccggccatcttagcggctgctgttggttgggggccgtcccgctcctaaggcaggaagatggtggccgcaaagaagacgaaaaagtcgctggagtcgatcaactctaggctccaactcgttatgaaaagtgggaagtacgtcctggggtacaagcagactctgaagatgatcagacaaggcaaagcgaaattggtcattctcgctaacaactgcccagctttgaggaaatctgaaatagagtactatgctatgttggctaaaactggtgtccatcactacagtggcaataatattgaactgggcacagcatgcggaaaatactacagagtgtgcacactggctatcattgatccaggtgactctgacatcattagaagcatgccagaacagactggtgaaaagtaaaccttttcacctacaaaatttcacctgcaaaccttaaacctgcaaaattttcctttaataaaatttgcttgttttaaaaacattgtaaaaaaaaaaaaaaaaaaaa

SEQ ID NO: 12544 - protein, 115 aa, Homo sapiens [sequence omitted]

SEQ ID NO: 12545 - DNA, 396 bp, Rattus norvegicus
  ref <308>: DATABASE ACCESSION NUMBER: EMBL / D84482
  ref <309>: DATABASE ENTRY DATE: 1997-06-01
gcaacacaagtcaatctttattgaaaactgcagtattaattacataacaattctggttacaataaacgtgcttttaaggattttaaatctgagctcatctactcatcagattgcataaaaaattaaaacagtatgaatttacatctaattgaactggctcgggatggacagtctgcccgttcctttgaattgacacgtaaggtccacgaagaggcaagggatgcctttaacactggaagacaatgctgacttaagcataaaaaaaattaccaacaacagtgtaaaaaattatttaaaaacaaaagtttaaaaaaagaaccttttctgttcacagcctatcaggctccttggggcctccagctgccacaataaccccctggaagccatccccagtct

SEQ ID NO: 12546 - DNA, 3205 bp, Rattus norvegicus; identical to SEQ ID NO: 2215
  ref <308>: DATABASE ACCESSION NUMBER: EMBL / D84667
  ref <309>: DATABASE ENTRY DATE: 1999-01-21

SEQ ID NO: 12547 - protein, 816 aa, Rattus norvegicus; identical to SEQ ID NO: 2216
  ref <308>: DATABASE ACCESSION NUMBER: SWISS-Prot / BAA18969
  ref <309>: DATABASE ENTRY DATE: 2002-10-01

SEQ ID NO: 12548 - DNA, 3068 bp, Homo sapiens
  ref <308>: DATABASE ACCESSION NUMBER: EMBL / U81802
  ref <309>: DATABASE ENTRY DATE: 2000-03-04
gaagtccctatcagattacacttggttgactactccggagcagccactaagagggatgaacaggcctgcgtggaaattgaatgagattagttgagtccacgctccatgagaatgctgaacaccatccaaagcagcaaattgagattccttgatttggggaagaggtttgggaggaacccttcaataattggcatgggacaagaggggacccagtccaagtgtatttgggactcgcagtagggaggaacaattcagagagagcttggaagctcgaagtctggctgtggccatgggagatacagtagtggagcctgcccccttgaagccaacttctgagcccacttctggcccaccagggaataatggggggtccctgctaagtgtcatcacggagggggtcggggaactatcagtgattgaccctgaggtggcccagaaggcctgccaggaggtgttggagaaagtcaagcttttgcatggaggcgtggcagtctctagcagaggcaccccactggagttggtcaatggggatggtgtggacagtgagatccgttgcctagatgatccacctgcccagatcagggaggaggaagatgagatgggggccgctgtggcctcaggcacagccaaaggagcaagaagacggcggcagaacaactcagctaaacagtcttggctgctgaggctgtttgagtcaaaactgtttgacatctccatggccatttcatacctgtataactccaaggagcctggagtacaagcctacattggcaaccggctcttctgctttcgcaacgaggacgtggacttctatctgccccagttgcttaacatgtacatccacatggatgaggacgtgggtgatgccattaagccctacatagtccaccgttgccgccagagcattaacttttccctccagtgtgccctgttggttggggcctattcttcagacatgcacatttccactcaacgacactcccgtgggaccaagctacggaagctgatcctctcagatgagctaaagccagctcacaggaagagggagctgccctccttgagcccggcccctgatacagggctgtctccctccaaaaggactcaccagcgctctaagtcagatgccactgccagcataagtctcagcagcaacctgaaacgaacagccagcaaccctaaagtggagaatgaggatgagcctgttcgactggctcctgagagagaattcatcaagtccctgatggcgatcggcaagcgggtggtcacgctccccaccaaagagcagaaaacacagaggctgatctcagagctctccctgctcaaccataagctccctgcccgagtctggctgtccactgctgggtttgaccaccacgtggtccgtgtaccccacacacaggctgttgtcctcaactccaaggacaaggctccctacctgatttatgtggaagtccttgaatgtgaaaactttgacaccaccagtgtccctgcccggatccccgagaaccgaattcggagtacgaggtccgtagaaaacttgcccgaatgtggtattacccatgagcagcgagctggcagcttcagcactgtgcccaactatgacaacgatgatgaggcctggtcggtggatgacataggcgagctgcaagtggagctccccgaagtgcataccaacagctgtgacaacatctcccagttctctgtggacagcatcaccagccaggagagcaaggagcctgtgttcattgcagcaggggacatccgccggcgcctttcggaacagctggctcataccccgacagccttcaaacgagacccagaagatccttctgcagttgctctcaaagagccctggcaggagaaagtacggcggatcagagagggctccccctacggccatctccccaattggcggctcctgtcagtcattgtcaagtgtggggatgaccttcggcaagagcttctggcctttcaggtgttgaagcaactgcagtccatttgggaacaggagcgagtgcccctttggatcaagccatacaagattcttgtgatttcggctgatagtggcatgattgaaccagtggtcaatgctgtgtccatccatcaggtgaagaaacagtcacagctctccttgctcgattacttcctacaggagcacggcagttacaccactgaggcattcctcagtgcacagcgcaattttgtgcaaagttgtgctgggtactgcttggtctgctacctgctgcaagtcaaggacagacacaatgggaatatccttttggacgcagaaggccacatcatccacatcgacttcggcttcatcctctccagctcaccccgaaatctgggctttgagacgtcagcctttaagctgaccacagagtttgtggatgtgatgggcggcctggatggcgacatgttcaactactataagatgctgatgctgcaagggctgattgccgctcggaaacacatggacaaggtggtgcagatcgtggagatcatgcagcaaggttctcagcttccttgcttccatggctccagcaccattcgaaacctcaaagagaggttccacatgagcatgactgaggagcagctgcagctgctggtggagcagatggtggatggcagtatgcggtctatcaccaccaaactctatgacggcttccagtacctcaccaacggcatcatgtgacacgctcctcagcccaggagtggtggggggtccagggcaccctccctagagggcccttgtttgagaaaccccaaaccaggaaaccccacctacccaaccatccacccaagggaaatggaaggcaagaaacacgaaggatcatgtggtaactgcgagagcttgctgaggggtgggagagccagctgtggggtccagacttgttggggcttccctgcccctcctggtctgtgtcagtattaccaccagactgactccaggactcactgccctccagaaaacagaggtgacaaatgtgagggacactggggcctttcttctccttgtaggggtctctcagaggttctttccacaggccatcctcttattccgttct

SEQ ID NO: 12549 - protein, 801 aa, Homo sapiens [sequence omitted]

SEQ ID NO: 12550 - DNA, 1111 bp, Rattus norvegicus
  ref <308>: DATABASE ACCESSION NUMBER: EMBL / D86580
  ref <309>: DATABASE ENTRY DATE: 1999-01-21
agagccaggaagaaacaggaacaagacacagaccatgagctccagccaatcaggggtctgcccatgccagggctctgcaagccaccccaccattctctacacacttctaagccccggtcccaggaccaggcccatggcacccgcatctcgcagccactgcctgtgccagcaacaccggcctgtgcgcctgtgtgctccacaccgcacctgcagggaggccttggatgtcctaggcaagactgtagccttcctcaggaacctgccgtccttctgcctcctgccccatgaggatcagcgacggctgctagagggctgctggggccctctcttcctgcttgggttggcccaggatactgtgacctttgaggtggccgaggctccggtccccagcatacttaaaaagatcttgctagaggaacccaacagtggtgcccagggtgcccagccaccagacccaccacaaccctcactggctgccgtgcagtggctgcagcactgcctggagtctttctggagccttgagctgggtcccaaggagtacgcatacctgaaaggcactatcctcttcaacccagatgtgccaggcctccatgcctcctgccacattgcacacctgcaacaggaggctcactgggcattgtgtgaagtcctggagccctggtacccagctagccaaggccgcctggcccgaatcctcctcatggcttccaccctcaagaacatctcctgtacccttctggtagatctcttcttccgccctgtcatcggagatgttgacatcactgaactgcttgaagacatgcttttgttgaggtgacctgtagaatggggtccggtgcctccaaaggggagcctgaaaggccgcactcagctcccctggagcagccctcgtctcagccccacccccagcttggatttcctcggtttgcatacagtgtttgactaactgtccagcaggcccttgatggctcccaaaacctccaggccaatatgccttcccttacctgggtagggatgggagcatgaggctgtgcttcagggcagaattcctccagactttatatagaactaagttaagttattggtttttgtaataaaaggtgtgaactgc

SEQ ID NO: 12551 - protein, 260 aa, Rattus norvegicus
  ref <308>: DATABASE ACCESSION NUMBER: SWISS-Prot / BAA13127
  ref <309>: DATABASE ENTRY DATE: 2003-02-01
MSSSQSGVCPCQGSASHPTILYTLLSPGPRTRPMAPASRSHCLCQQHRPVRLCAPHRTCREALDVLGKTVAFLRNLPSFCLLPHEDQRRLLEGCWGPLFLLGLAQDTVTFEVAEAPVPSILKKILLEEPNSGAQGAQPPDPPQPSLAAVQWLQHCLESFWSLELGPKEYAYLKGTILFNPDVPGLHASCHIAHLQQEAHWALCEVLEPWYPASQGRLARILLMASTLKNISCTLLVDLFFRPVIGDVDITELLEDMLLLR

SEQ ID NO: 12552 - DNA, 1168 bp, Homo sapiens
  ref <308>: DATABASE ACCESSION NUMBER: Refseq / NM_021969
  ref <309>: DATABASE ENTRY DATE: 2001-03-09
gagctggaagtgagagcagatccctaaccatgagcaccagccaaccaggggcctgcccatgccagggagctgcaagccgccccgccattctctacgcacttctgagctccagcctcaaggctgtcccccgaccccgtagccgctgcctatgtaggcagcaccggcccgtccagctatgtgcacctcatcgcacctgccgggaggccttggatgttctggccaagacagtggccttcctcaggaacctgccatccttctggcagctgcctccccaggaccagcggcggctgctgcagggttgctggggccccctcttcctgcttgggttggcccaagatgctgtgacctttgaggtggctgaggccccggtgcccagcatactcaagaagattctgctggaggagcccagcagcagtggaggcagtggccaactgccagacagaccccagccctccctggctgcggtgcagtggcttcaatgctgtctggagtccttctggagcctggagcttagccccaaggaatatgcctgcctgaaagggaccatcctcttcaaccccgatgtgccaggcctccaagccgcctcccacattgggcacctgcagcaggaggctcactgggtgctgtgtgaagtcctggaaccctggtgcccagcagcccaaggccgcctgacccgtgtcctcctcacggcctccaccctcaagtccattccgaccagcctgcttggggacctcttctttcgccctatcattggagatgttgacatcgctggccttcttggggacatgcttttgctcaggtgacctgttccagcccaggcagagatcaggtgggcagaggctggcagtgctgattcagcctggccatccccagaggtgacccaatgctcctggaggggcaagcctgtatagacagcacttggctccttaggaacagctcttcactcagccacaccccacattggacttccttggtttggacacagtgctccagctgcctgggaggcttttggtggtccccacagcctctgggccaagactcctgtcccttcttgggatgagaatgaaagcttaggctgcttattggaccagaagtcctatcgactttatacagaactgaattaagttattgatttttgtaataaaaggtatgaaacactaaaaaaaaa

SEQ ID NO: 12553 - protein, 257 aa, Homo sapiens
  ref <308>: DATABASE ACCESSION NUMBER: Refseq / NP_068804
  ref <309>: DATABASE ENTRY DATE: 2001-03-09
MSTSQPGACPCQGAASRPAILYALLSSSLKAVPRPRSRCLCRQHRPVQLCAPHRTCREALDVLAKTVAFLRNLPSFWQLPPQDQRRLLQGCWGPLFLLGLAQDAVTFEVAEAPVPSILKKILLEEPSSSGGSGQLPDRPQPSLAAVQWLQCCLESFWSLELSPKEYACLKGTILFNPDVPGLQAASHIGHLQQEAHWVLCEVLEPWCPAAQGRLTRVLLTASTLKSIPTSLLGDLFFRPIIGDVDIAGLLGDMLLLR

SEQ ID NO: 12554 - DNA, 1111 bp, Rattus norvegicus; identical to SEQ ID NO: 12550
  ref <308>: DATABASE ACCESSION NUMBER: EMBL / D86580
  ref <309>: DATABASE ENTRY DATE: 1999-01-21

SEQ ID NO: 12555 - protein, 260 aa, Rattus norvegicus; identical to SEQ ID NO: 12551
  ref <308>: DATABASE ACCESSION NUMBER: SWISS-Prot / BAA13127
  ref <309>: DATABASE ENTRY DATE: 2003-02-01

SEQ ID NO: 12556 - DNA, 1168 bp, Homo sapiens; identical to SEQ ID NO: 12552
  ref <308>: DATABASE ACCESSION NUMBER: Refseq / NM_021969
  ref <309>: DATABASE ENTRY DATE: 2001-03-09

SEQ ID NO: 12557 - protein, 257 aa, Homo sapiens; identical to SEQ ID NO: 12553
  ref <308>: DATABASE ACCESSION NUMBER: Refseq / NP_068804
  ref <309>: DATABASE ENTRY DATE: 2001-03-09

SEQ ID NO: 12558 - DNA, 1279 bp, Rattus norvegicus
  ref <308>: DATABASE ACCESSION NUMBER: EMBL / D87840
  ref <309>: DATABASE ENTRY DATE: 1998-03-25
gacagagaaaggcatggagcccatcctggccctcctgctggccctgggacccttccagctcagcagaggccagtccttccaggtgaatcctcctgagcctgaggtagctgtagccatgggcacatccctccagatcaactgcagcatgtcctgtgacaaggatatagcccgggtgcactggcatggcctggacaccaacctgggcaatgtgcagaccctcccaggcagcagggtcctctccgtacgaggcatgctgtcagacacgggcactcgtgtatgcgtgggttcctgtgggagtcgaagctttcagcactctgtgaagatccttgtgtatgcctttccagaccagctggaggtaaccccggagttccttgtacctggacgggaccaggtagtgtcctgcacagcccacaacatctggcctgcaggcccggacagtctttcctttgccttgctccgaggagagcagagcctggagggtgctcaggccctggaaacagagcaagaggaggagatgcaagagactgagggcactccactcttccaagtgacacaacgctggttgctgccctccctggggacccccgcccttcccgccctttattgccaggtcaccatgcagctgcccaaactggtgctgacacatagaaggaagattccagtcctacagagccagacctcaccagagccccccagcaccacctctgctaagccatacatcctgacctcatcacatactactaaggcagtctccactgggctcagcagtgtagccctgccttctacgcctctgagctccgaggggccctgctaccccgaaatccaccagaacccagaggcagactgggaacttctctgcgaagcctcctgtgggtctggagtgacggtgcattggaccctggctcctggtgacctggcagcctaccacaagagagaagctggggcccaggcatggctaagcgtgctgcccctgggccccattcctgagggctggttccagtgtcgcatggaccctggcgggcaggtgaccagtctgtatgttactggccaggtgatcccaaacccctcctccatggtcgccctgtggattggcagcttggtgctggggctgcttgcactcgccttccttgcctactgcctgtggaaacgctaccggccgggtcctctcccagactccagctcgtgtacgctcctatgaagttccattatgccagactaagggaggcaaaggattaccagatgtaggtttggggcatcaagatgatagtgtggccccttt

SEQ ID NO: 12559 - protein, 394 aa, Rattus norvegicus
  ref <308>: DATABASE ACCESSION NUMBER: SWISS-Prot / BAA25260
  ref <309>: DATABASE ENTRY DATE: 2003-02-01
MEPILALLLALGPFQLSRGQSFQVNPPEPEVAVAMGTSLQINCSMSCDKDIARVHWHGLDTNLGNVQTLPGSRVLSVRGMLSDTGTRVCVGSCGSRSFQHSVKILVYAFPDQLEVTPEFLVPGRDQVVSCTAHNIWPAGPDSLSFALLRGEQSLEGAQALETEQEEEMQETEGTPLFQVTQRWLLPSLGTPALPALYCQVTMQLPKLVLTHRRKIPVLQSQTSPEPPSTTSAKPYILTSSHTTKAVSTGLSSVALPSTPLSSEGPCYPEIHQNPEADWELLCEASCGSGVTVHWTLAPGDLAAYHKREAGAQAWLSVLPLGPIPEGWFQCRMDPGGQVTSLYVTGQVIPNPSSMVALWIGSLVLGLLALAFLAYCLWKRYRPGPLPDSSSCTLL

SEQ ID NO: 12560 - DNA, 711 bp, Rattus norvegicus
  ref <308>: DATABASE ACCESSION NUMBER: EMBL / D88586
  ref <309>: DATABASE ENTRY DATE: 1997-04-25
acctctgatttccaggacagccagcactcagttccacaggagccacaacgcacactgggaaacatgggtctgaagctgctcgagtccagactttgtctccttctgtcgctgggacttgtcttgatgcttgcctcatgccagccaccaaccccttcccagtggtttgaaatccagcacatctataatagggcttatccccgatgtaatgatgcaatgcgacacagaaacagattcacaggacattgtaaggacataaatacttttcttcatacaagttttgctagtgttgttggtgtgtgtggcaatagaaacatcccctgtggaaacaggacatatagaaattgtcataacagtcgatatcgggtatctataactttctgtaacctcacaactccggcaaggatttatacccaatgtagataccaaactacaagatccaggaagttctacacagttggctgtgacccgaggactccacgggacagtcccatgtatccagtggttccggttcacttggataggatattttagctccggtgccagcactttgtacctgagctcatcggctcctgccaagatcacagtagtgaagatccagttcctctgtctgcactgcatatcagctcctgtcctcatgaaacctgtccctgactccttttagtatagcttaacagatttttgtaatcaataaacacctttgcatatgcatct

SEQ ID NO: 12561 - protein, 155 aa, Rattus norvegicus
  ref <308>: DATABASE ACCESSION NUMBER: SWISS-Prot / P70709
  ref <309>: DATABASE ENTRY DATE: 1998-07-15
MGLKLLESRLCLLLSLGLVLMLASCQPPTPSQWFEIQHIYNRAYPRCNDAMRHRNRFTGHCKDINTFLHTSFASVVGVCGNRNIPCGNRTYRNCHNSRYRVSITFCNLTTPARIYTQCRYQTTRSRKFYTVGCDPRTPRDSPMYPVVPVHLDRIF

SEQ ID NO: 12562 - DNA, 715 bp, Homo sapiens
  ref <308>: DATABASE ACCESSION NUMBER: EMBL / X15161
  ref <309>: DATABASE ENTRY DATE: 1995-03-22
gaacaaccagctggatcagttctcacaggagccacagctcagagactgggaaacatggttccaaaactgttcacttcccaaatttgtctgcttcttctgttggggcttatgggtgtggagggctcactccatgccagacccccacagtttacgagggctcagtggtttgccatccagcacatcagtctgaacccccctcgatgcaccattgcaatgcgggcaattaacaattatcgatggcgttgcaaaaaccaaaatacttttcttcgtacaacttttgctaatgtagttaatgtttgtggtaaccaaagtatacgctgccctcataacagaactctcaacaattgtcatcggagtagattccgggtgcctttactccactgtgacctcataaatccaggtgcacagaatatttcaaactgcaggtatgcagacagaccaggaaggaggttctatgtagttgcatgtgacaacagagatccacgggattctccacggtatcctgtggttccagttcacctggataccaccatctaagctcctgtatcagcagtcctcatcatcactcatctgccaagctcctcaatcatagccaagatcccatccctccatgtactctgggtatcagcaactgtcctcatcagtctccataccccttcagctttcctgagctgaagtcccttgtgaaccctgcaataaactgctttgcaaattc

SEQ ID NO: 12563 - protein, 160 aa, Homo sapiens
  ref <308>: DATABASE ACCESSION NUMBER: SWISS-Prot / P12724
  ref <309>: DATABASE ENTRY DATE: 2002-06-15
MVPKLFTSQICLLLLLGLMGVEGSLHARPPQFTRAQWFAIQHISLNPPRCTIAMRAINNYRWRCKNQNTFLRTTFANVVNVCGNQSIRCPHNRTLNNCHRSRFRVPLLHCDLINPGAQNISNCRYADRPGRRFYVVACDNRDPRDSPRYPVVPVHLDTTI

SEQ ID NO: 12564 - DNA, 1928 bp, Rattus norvegicus
  ref <308>: DATABASE ACCESSION NUMBER: EMBL / D89514
  ref <309>: DATABASE ENTRY DATE: 1997-10-16
gagcctacgcacgtgtcctgtctgtctccagactccgcgacccggcgcagcagccatggcttcctcccagcttgccctgttcagtgtgtctgacaaaactggcctcgtggaatttgccagaaaccacgcgtctcttggtttgagtttggtcgcttctggaggcacggcaaaagcgatcagggatgctggcctggcagtgagagatgtgtctgagctaactgggttccctgaaatgttaggggggcgtgtgaaaaccttgcatcctgcagtccatgctggaatcttagcacgcaatattccagaagatgctgctgacatggccaggcttgatttcaacctcataagagttgttgtctgtaacctgtacccgttcgtgaagactgtggcttctccagatgtaaccgttgaggcagctgttgagcaaattgacattggtggcgtgaccttactgagagctgcagccaaaaaccatgctcgagtgacagttgtgtgtgagccagaggactatggtgcggtggctgcagagatgcagggctctggtaataaggacacctccctggagaccaggcgccacttggcattgaaggcattcacgcataccgctcaatatgatgaagcgatttcggattacttcaggagacagtacagtaaaggaatttctcagatgcccttgaggtatgggatgaacccccatcagactcctgcccagctgtatacactgaagcccaagcttcccatcacagttctcaacggagccccaggattcataaacctctgcgatgctttgaatgcctggcagctggtgacagagctgagaggagcagtagacattccagctgcggcgtctttcaagcacgtcagcccagcaggtgctgctgttggggttccactcagtgaggacgaagccagagtctgcatggtctatgacctctatccgaccctcacgcccctggccattgcatatgcaagagcaagaggagctgataggatgtcttcatttggtgattttgttgcattatctgatgtttgtgatgtcccaactgcaaaaattatctccagagaagtgtcagatggtattgttgccccaggatatgaggaagaggccttgaaaatactttctaaaaagaaaaatggaagctactgtgttcttcagatggaccagtcctacaaaccggatgaaaatgaagttcgaacactctttggtcttcgtttaagccagaagagaaataatggtgttgttgacaagtcgttgtttagcaatattgtcaccaagaataaagatctgccggaatctgctctccgagacctcattgtcgccaccatcgctgtcaagtatactcagtctaattcggtgtgctatgccaaggacgggcaggttattggcatcggagcaggacagcagtctcggatacactgtacacgccttgcaggtgataaggcaaactcttggtggcttcggcaccatccacgagtgctttccatgaagtttaaagctggggtgaagagagcagaagtctccaatgccatcgatcagtatgtgaccggcaccattggtgagggtgaagacctggtgaaatggaaagcactgtttgaagaggttcctgagttactcactgaggcggagaagaaggaatgggtggacaagctgagtggcgtgtctgtcagttccgatgctttctttcctttcagggataatgtagaccgagcgaaaaggagtggtgtggcctacattgttgctccatccggatctactgccgacaaggttgtgatcgaggcgtgtgacgagctggggatcgtgttggctcatacagatctgcgtctcttccaccactgaccttggctgacattgttacattgtttcctagtgggagatactcatgtgtgggaccctgaaagtatctctttttaaacagagtcattcttatctt

SEQ ID NO: 12565 - protein, 592 aa, Rattus norvegicus
  ref <308>: DATABASE ACCESSION NUMBER: SWISS-Prot / BAA22837
  ref <309>: DATABASE ENTRY DATE: 2002-06-01
MASSQLALFSVSDKTGLVEFARNHASLGLSLVASGGTAKAIRDAGLAVRDVSELTGFPEMLGGRVKTLHPAVHAGILARNIPEDAADMARLDFNLIRVVVCNLYPFVKTVASPDVTVEAAVEQIDIGGVTLLRAAAKNHARVTVVCEPEDYGAVAAEMQGSGNKDTSLETRRHLALKAFTHTAQYDEAISDYFRRQYSKGISQMPLRYGMNPHQTPAQLYTLKPKLPITVLNGAPGFINLCDALNAWQLVTELRGAVDIPAAASFKHVSPAGAAVGVPLSEDEARVCMVYDLYPTLTPLAIAYARARGADRMSSFGDFVALSDVCDVPTAKIISREVSDGIVAPGYEEEALKILSKKKNGSYCVLQMDQSYKPDENEVRTLFGLRLSQKRNNGVVDKSLFSNIVTKNKDLPESALRDLIVATIAVKYTQSNSVCYAKDGQVIGIGAGQQSRIHCTRLAGDKANSWWLRHHPRVLSMKFKAGVKRAEVSNAIDQYVTGTIGEGEDLVKWKALFEEVPELLTEAEKKEWVDKLSGVSVSSDAFFPFRDNVDRAKRSGVAYIVAPSGSTADKVVIEACDELGIVLAHTDLRLFHH

SEQ ID NO: 12566 - DNA, 2068 bp, Homo sapiens
  ref <308>: DATABASE ACCESSION NUMBER: EMBL / D82348
  ref <309>: DATABASE ENTRY DATE: 1997-04-24
cggcagccctcctacctgcgcacgtggtgccgctgctgctgcctcccgctcgccctgaacccagtgcctgcagccatggctcccggccagctcgccttatttagtgtctctgacaaaaccggccttgtggaatttgcaagaaacctgaccgctcttggtttgaatctggtcgcttccggagggactgcaaaagctctcagggatgctggtctggcagtcagagatgtctctgagttgacgggatttcctgaaatgttggggggacgtgtgaaaactttgcatcctgcagtccatgctggaatcctagctcgtaatattccagaagataatgctgacatggccagacttgatttcaatcttataagagttgttgcctgcaatctctatccctttgtaaagacagtggcttctccaggtgtaactgttgaggaggctgtggagcaaattgacattggtggagtaaccttactgagagctgcagccaaaaaccacgctcgagtgacagtggtgtgtgaaccagaggactatgtggtggtgtccacggagatgcagagctccgagagtaaggacacctccttggagactagacgccagttagccttgaaggcattcactcatacggcacaatatgatgaagcaatttcagattatttcaggaaacagtacagcaaaggcgtatctcagatgcccttgagatatggaatgaacccacatcagacccctgcccagctgtacacactgcagcccaagcttcccatcacagttctaaatggagcccctggatttataaacttgtgcgatgctttgaacgcctggcagctggtgaaggaactcaaggaggctttaggtattccagccgctgcctctttcaaacatgtcagcccagcaggtgctgctgttggaattccactcagtgaagatgaggccaaagtctgcatggtttatgatctctataaaaccctcacacccatctcagcggcatatgcaagagcaagaggggctgataggatgtcttcatttggtgattttgttgcattgtccgatgtttgtgatgtaccaactgcaaaaattatttccagagaagtatctgatggtataattgccccaggatatgaagaagaagccttgacaatactttccaaaaagaaaaatggaaactattgtgtccttcagatggaccaatcttacaaaccagatgaaaatgaagttcgaactctctttggtcttcatttaagccagaagagaaataatggtgtcgtcgacaagtcattatttagcaatgttgttaccaaaaataaagatttgccagagtctgccctccgagacctcatcgtagccaccattgctgtcaagtacactcagtctaactctgtgtgctacgccaagaacgggcaggttatcggcattggagcaggacagcagtctcgtatacactgcactcgccttgcaggagataaggcaaactattggtggcttagacaccatccacaagtgctttcgatgaagtttaaaacaggagtgaagagagcagaaatctccaatgccatcgatcaatatgtgactggaaccattggcgaggatgaagatttgataaagtggaaggcactgtttgaggaagtccctgagttactcactgaggcagagaagaaggaatgggttgagaaactgactgaagtttctatcagctctgatgccttcttccctttccgagataacgtagacagagctaaaaggagtggtgtggcgtacattgcggctccctccggttctgctgctgacaaagttgtgattgaggcctgcgacgaactgggaatcatcctcgctcatacgaaccttcggctcttccaccactgattttaccacacactgttttttggcttgcttatgtgtaggtgaacagtcacgcctgaaactttgaggataactttttaaaaaaataaaacagtatctcttaaaacaatgttttgatctacataaacattgtaaaaattttcaatcacgctttttaactttcttaccacaaaaaaatgataagtgggtgaagtgatggttatgttaattagcgtgc

SEQ ID NO: 12567 - protein, 592 aa, Homo sapiens
  ref <308>: DATABASE ACCESSION NUMBER: SWISS-Prot / BAA11559
  ref <309>: DATABASE ENTRY DATE: 2002-06-15
MAPGQLALFSVSDKTGLVEFARNLTALGLNLVASGGTAKALRDAGLAVRDVSELTGFPEMLGGRVKTLHPAVHAGILARNIPEDNADMARLDFNLIRVVACNLYPFVKTVASPGVTVEEAVEQIDIGGVTLLRAAAKNHARVTVVCEPEDYVVVSTEMQSSESKDTSLETRRQLALKAFTHTAQYDEAISDYFRKQYSKGVSQMPLRYGMNPHQTPAQLYTLQPKLPITVLNGAPGFINLCDALNAWQLVKELKEALGIPAAASFKHVSPAGAAVGIPLSEDEAKVCMVYDLYKTLTPISAAYARARGADRMSSFGDFVALSDVCDVPTAKIISREVSDGIIAPGYEEEALTILSKKKNGNYCVLQMDQSYKPDENEVRTLFGLHLSQKRNNGVVDKSLFSNVVTKNKDLPESALRDLIVATIAVKYTQSNSVCYAKNGQVIGIGAGQQSRIHCTRLAGDKANYWWLRHHPQVLSMKFKTGVKRAEISNAIDQYVTGTIGEDEDLIKWKALFEEVPELLTEAEKKEWVEKLTEVSISSDAFFPFRDNVDRAKRSGVAYIAAPSGSAADKVVIEACDELGIILAHTNLRLFHH

SEQ ID NO: 12568 - DNA, 3387 bp, Rattus norvegicus
  ref <308>: DATABASE ACCESSION NUMBER: EMBL / D90048
  ref <309>: DATABASE ENTRY DATE: 2001-11-15
acacacacaagttgactttatttttgtaacctggctggcttctgttgttgtaaaaatataaaaaaattaaaaagtacagttgtcttttacccccactaggtccggcaccacggtgccccaagatatctgctgggtatcttaattctcagtcagcaaagcatctcactcactctgcttcatcccctatcacactgccaaaggcctctctctgagcctggcagcaatctctctacctatctagttcccaaggcaggtttccatgccagaaacacacatcccaactctgtagtggcccagcctagccgccccccactccattacacttaaatctacactcgaaagaacacacaacacaataacctttgacccaattgataagatataattgcccacctaaacatacaaagcccagtaccatccatcccttaagaacattaataacaacctgtaatacacagagcggaatgttttttttttcttttttttcggagctggggaccgaacccagggccttgcgcttgctaggcaagcgctctaccactgagctaaatccccaaccccacacacagcagaatcttaacgtcacctgccatggcttctcgccctctccccatgtctcttcctcctttctgttccagtctcctcctcttccttcaaacttctctcccacccatcctttcttctcatccaatgacaagcctccttctatcctgtacctgcccctctcttgtattttacaaattcaatggggagaaggttctggtgaagacacctgagtcctgagtacacgactaagcagctgtccttgaggcagtggaattagcatcaaaatacagataattccaggacaaaccacaacaggcttcaaacgttatcctcacacctttagtttgggttacgagcatggattaacataccaggctcttcttccttttcttctttcctcctccttttttttttttttttttcctgagttagggtctagttatgctgtcctgacttgactttgaactcctgacctcagtcaatccttttaccccaggctcccaactcccaagtagctgaatccagatatggtcaccatgcctggtacattcattgaatttaattatgtcacttcgctagtttaaatgctagagttactcccatgatatttggagtaaatatggaattacagtcagacatagttgtgcacacctgtaatttcagcagaggaaggtaactctgagctggatatgatggtacacacccgcaatcccagtattcaggagaatcaggagttcgaatcatccttgggtactccagaccagcctgggacaaataagatcctgtctcaagaaaagaaaaacaaaaaacaaaacaaacaaaccgctgtattatggccactaaaagtaataaaatatcatagtgatatatttttataagtccacaatttgggaggcagaggcaggagcacctcttcaaggccagtcctccacgtgggagaagaggagagccaattcctattagtatgggccatggtgttcctgtcacagaaaggtaaagatgatggcctctgttctttttaagccattgggctgcaacttcagtctaatgggatttaacacagcttcctcagagctggagcatcagttgtaggagctccaacaaacatggaggggagagcagacctgtgggtggggggactgggaggcagggcatatgcagacctggcggtagaactaagttaaaggatgcacggaaattctggggcctcagacaagtttgggaagatggcagggaccctggttctggagaacaggttggacaaaggagccagtggaactgagaagggtgtcctgtgaaggcttctatccctctctgtgttctagtttctaggctctttcttggtgtctggcgcttttctttattcttctcacattctgccctctgttccggaggctttcgaagtaactctatctctttttaaattccctgcccagagccccccatttttgagtacgtatcggcttgtttttcggtttgagcttctaagggggtgatttttttcccttcaactctacccagactcaccttctgttttcttttcccaccttgtttcagtaccgtatcaggggtctggggaaaggaagagcccgctaggaccaaaagacgcaccagggggcgggtccaattcctctataatttgcatatgtatgaggtctactaggctagcaacgaggaggcggggttcctggggggtgggtgggaagggggcggacacccttagagtcacagagtataaagactgtgcgcagggaccgcgctccccgcactgctgaggagcggagcctccgattgggggcccctatccttgccagcccccccccccactgctcgtccccgccccagctcccactggctgggccaactgtggtgtggctgtcgccgtttgtcggaggagccttaatcggccacctgccgcgttccactgcctctttacatctcggatttcggggcggctccctcccccatctttccctgcttctttgcaccccgctttttctgcgtttcgctcgaattttggagccgtctggttttgcacccctttttgttttgcttttaggcggtgtgtggggtgaaggtgccttggcatcccttcctctggttatctttccctgttttgacagcccccctttctatcgcagtcgggggacctagcctcggtgcacctccgccgcactgccagcagaccacagcgcgtggctgtgcaccccggaatttgcaacagctgcatatctgtgatcggagtctccctcgcctcgctcccgcgctcattcggtgcgtggagggcttcagcgcgcaacgccccggcttctccgcagcccccagcagcgcgccgggactcgccccgtgcctccaagatggtcatccaaaaagagaagaagagctgcgggcaggtggttgaggagtggaaggagttcgtgtggaatcctcggacgcaccagttcatggggcgcaccgggaccagctggggtacgcggggctggcgcgggaaaggtggtagctgaccgctcggcgacgcctttggggcgcagggtcccgcgggcgtcgccccagctctcctgccgggtccctggcgtccagcccccactgtcgggctttggatcgggaggggcccgaatcagcggtctaatctctctgactggccgctgcggaggcggagaaagtaggtcactgcctgcccgttccccgcagagccccctcgggcggggggtcgcgggctctgcgcgcgtgtccgtgccacggcgctcccgctccggctcaggccctgcggctgcacacggtcatcatccctctccccgaagagtgccctaactctccctctggctctcactagctagctag

SEQ ID NO: 12569 - protein, 290 aa, Rattus norvegicus
  ref <308>: DATABASE ACCESSION NUMBER: SWISS-Prot / BAA14101
  ref <309>: DATABASE ENTRY DATE: 2001-10-16
MVIQKEKKSCGQVVEEWKEFVWNPRTHQFMGRTGTSWAFILLFYLVFYGFLTAMFTLTMWVMLQTVSDHTPKYQDRLATPGLMIRPKTENLDVIVNISDTESWDQHVQKLNKFLEPYNDSIQAQKNDVCRPGRYYEQPDNGVLNYPKRACQFNRTQLGNCSGIGDPTHYGYSTGQPCVFIKMNRVINFYAGANQSMNVTCVGKKDEDAENLGHFIMFPANGNIDLMYFPYYGKKFHVNYTQPLVAVKFLNVTPNVEVNVECRINAANIATDDERDKFAARVAFKLRINKA

SEQ ID NO: 12570 - DNA, 2397 bp, Homo sapiens
  ref <308>: DATABASE ACCESSION NUMBER: Refseq / NM_001678
  ref <309>: DATABASE ENTRY DATE: 2002-11-05
cccgccccgcgcccggactcgccccgcgccaccaagatggtcatccagaaagagaagaagagctgcgggcaggtggttgaggagtggaaggagttcgtgtggaacccgaggacgcaccagtttatgggccgcaccgggaccagctgggcctttatcctcctcttctacctcgttttttatgggttcctcaccgccatgttcaccctcaccatgtgggtgatgctgcagactgtctccgaccatacccccaagtaccaggaccgactggccacaccgggcttgatgattcgccccaagactgagaaccttgatgtcattgtcaatgtcagtgacactgaaagctgggaccagcatgttcagaagctcaacaagttcttggagccttacaacgactctatccaagcccaaaagaatgatgtctgccgccctgggcgctattacgaacagccagataatggagtcctcaactaccccaaacgtgcctgccaattcaaccggacccagctgggcaactgctccggcattggggactccacccactatggttacagcactgggcagccctgtgtcttcatcaagatgaaccgggtcatcaacttctatgcaggagcaaaccagagcatgaatgttacctgtgctgggaagcgagatgaagatgctgagaatctcggcaacttcgtcatgttccccgccaacggcaacatcgacctcatgtacttcccctactatggcaaaaagttccacgtgaactacacacagcccctggtggctgtgaagctcctgaatgtgacccccaacgtggaggtgaatgtagaatgtcgcatcaacgccgccaacatcgccacagacgatgagcgagacaagttcgccggccgcgtggccttcaaactccgcatcaacaaaacctgaggccccttcctcccaccccatctctctcctgtggatgctcctggaatgtccctgaccctgcctgatccctccctcacccaccccaaaggtatttttgataacagagctatgacttgtctgagcctcacatccttttccttgacttctcaacccagcctgaagtccattgcggttccgtcactcgcctttcccaccaacttctcccaacctcagatcagtcagacagggagctgggctaagatggccacagaggagttaggagcctttctagttctggtttagctgtgagagctatccactctcctgcctgcatatcccctgagagttatcggaagtgcccactgacccacccacccacctacaccccccgccacacacacacacaaacgtgcacacgcagtctcatttgacccctttgcttccagagatgaatgtggcactccctccttccattcctaagctctagccaccgtcccttgatctctcatactttctccctgtctacacagtcgccatcttggtgactttgaatttatctggctcctgggcaggtcttctcctcctctccatccctattccctcctctgaaatgcacccctttgtaattgaggacaaggtggttctgtggccttttccctctttgctggcacgttctgcttctcaccctctggtgactctgtgagctgggaaatgcgggactggaagtgaggcctgtgttgacccttcctgaaaatcctctagcagcccccgacttcagcagtttctttctttgtttttttgagatggagtttcgctcttgttgcccaggctggagtgcaatggtgcaatctcagctcactgcaacttccgcatcccaggttcaagcgattctcccgcctcaggttcccgagtagctgggactacaggcatgtgccaccatgcccggctaatttctttctttctttttttttttttttttgcattttttagtagagatgggggtttctccttgttggtcaggctggtctcgaactcccgacctcaggtgatccacctgcctcggcctcccaaagtgttgggattacaggcgtgagccaccgcgcctggccttcagtttcttcctaggccgttctgtcacccaaatagctgctacccagaggggcggggttgacctaggctgaatatccactttgtttttatggatggctcccttcccccattcgccttcccagaatatccttcaagttccacttcccagggagctctgggggaggggcggccattctggctccgtccccagtggccaccttggaaacatcggctggctttgggactattccacctccttcccctgagcccagatctgcccccaccatcctttctctggcttcttttagcaagttatcaactaatcactaactccttccttttcctctgcatgccagcctgaaaattccaaatctagcctctgaatgtcttggctccatctcttcagacccctttgccttt

SEQ ID NO: 12571 - protein, 290 aa, Homo sapiens
  ref <308>: DATABASE ACCESSION NUMBER: Refseq / NP_001669
  ref <309>: DATABASE ENTRY DATE: 2002-11-05
MVIQKEKKSCGQVVEEWKEFVWNPRTHQFMGRTGTSWAFILLFYLVFYGFLTAMFTLTMWVMLQTVSDHTPKYQDRLATPGLMIRPKTENLDVIVNVSDTESWDQHVQKLNKFLEPYNDSIQAQKNDVCRPGRYYEQPDNGVLNYPKRACQFNRTQLGNCSGIGDSTHYGYSTGQPCVFIKMNRVINFYAGANQSMNVTCAGKRDEDAENLGNFVMFPANGNIDLMYFPYYGKKFHVNYTQPLVAVKLLNVTPNVEVNVECRINAANIATDDERDKFAGRVAFKLRINKT

SEQ ID NO: 12572 - DNA, 3387 bp, Rattus norvegicus; identical to SEQ ID NO: 12568
  ref <308>: DATABASE ACCESSION NUMBER: EMBL / D90048
  ref <309>: DATABASE ENTRY DATE: 2001-11-15

SEQ ID NO: 12573 - protein, 290 aa, Rattus norvegicus; identical to SEQ ID NO: 12569
  ref <308>: DATABASE ACCESSION NUMBER: SWISS-Prot / BAA14101
  ref <309>: DATABASE ENTRY DATE: 2001-10-16

SEQ ID NO: 12574 - DNA, 2397 bp, Homo sapiens; identical to SEQ ID NO: 12570
  ref <308>: DATABASE ACCESSION NUMBER: Refseq / NM_001678
  ref <309>: DATABASE ENTRY DATE: 2002-11-05

SEQ ID NO: 12575 - protein, 290 aa, Homo sapiens; identical to SEQ ID NO: 12571
  ref <308>: DATABASE ACCESSION NUMBER: Refseq / NP_001669
  ref <309>: DATABASE ENTRY DATE: 2002-11-05

SEQ ID NO: 12576 - DNA, 3200 bp, Rattus norvegicus
  ref <308>: DATABASE ACCESSION NUMBER: EMBL / J00692
  ref <309>: DATABASE ENTRY DATE: 1999-02-10
acctgggccagggccagttctctccttctttggtcagtgcaggagacccgggcgggacccaggctgagaagcagccgaagggactctagtgcccaacacccaaatatggcttgggaagggcaacaacattccttcgggcggtgtggagagctcaggactatataaaaacctgaggctagggacaggcggtcacacggacgtgaagcctcacttcctaccctcggcaccagggccagagtcagagcagcaggtagggtggaggtggggagggtgacctggagacccagcagagaaacctattgagccttgggcctgtatttgtcactgggctctggaaatttctccaaactcatatccagcccatttgggatgctgacttttttgctggtgggaggggtgtctgacacccatccatttccaccctcagactctaccctccccccccccttgctggggactaaatccgagtcctcctgcaagtgagcaagccagtgtttcctaccgagccacacaccagcccctggttggttgagatttctctccctgaattagtttcccctcctgcctttcatccctctctcctccccaccctctttctctgctgggatcaaatctgggcccttgtgatgcaagaggtgggctggatctcccacagagccagcccctgggagactgacttgaagatgagtttggagagaggcaagcattgtcttagccttctgagctcaaggcttttctaaagcccaagcaccgtgccaggctactcttctctgaaataggaggcgggtggaagggttccttctgagtttggatgccgtggggcttcaaacgggcaattctttccagagttgggacagtattacccttccttgggcaaaatccttgccgctctcataagactggcaggtggaccttaatgcctccttcacagattgagattgagtagagaggaatagcgcgcgctagctgtgacatgtgtggccaacagcgaaggctgaggatctcaggatgtcctctgcatgcctacatggagggattaaagtggccaacaaactgttcccatagcaaaaagcacagccttgacctgggagagcatcctctggccctgtgcaaggaaggggctgggggagaggagtgtgtggatctccaaagtgaagatgggttaagcagagcttcaccttaacccccatcacatactcacaacgctcaacactttctctttgcagaaactagacaccatgtgtgacgaggacgagaccaccgctcttgtgtgtgacaacggctctggcctggtgaaagctggctttgccggggatgatgcccccagggctgtgttcccatccatcgtgggtcggccccgtcaccaggtcaggctgctagcagaagataggctctccgaatacagccggtgttctcctgcccctggctgtagtaacaagtatctgatgtctccatctgcagggtgtcatggtcggtatgggtcagaaggattcctacgtgggcgacgaggcccagagcaagcgaggtatcctgaccctgaagtaccccattgaacacggcattatcaccaactgggacgacatggagaagatctggcaccacaccttctacaatgagctgcgtgtggcccccgaggagcacccgaccctgctcactgaggcccctttgaaccccaaagctaaccgggagaagatgactcaaatcatgtttgagaccttcaacgtgcctgctatgtatgtggctattcaggcggtgctgtctctctatgcctccggccgaaccaccggtgagtgctcacacacggcccactctggtccaggtagcgtcgccccaacattccagcccagcttttgaatcctctgcctcagaccctgcaccgttcccattcaatccctgatgacccccagtccagaaccactgtccctgctctctctgctggtcccctccactcacacactgctcctcccctgcacaggcatcgtgttggattctggggacggtgtcacccacaacgtgcccatctatgagggttatgccctgccacacgccatcatgcgtctggacctcgctggtcgcgaccttactgactacctgatgaaaatcctcaccgagcgtggctattccttcgtgaccacaggtgcgtgctctcaacgccccgctgagggtgggccggcagagggtgagcacatgccccaggccttgctctgaggcctcccactgcttctgctccctgcagctgaacgtgagattgtgcgcgacatcaaagagaagctgtgctacgtggccctggacttcgagaatgagatggccaccgctgcctcttcctcctccctggaaaagagctatgagctgcctgacgggcaggtcatcaccatcggcaatgagcgcttccgttgcccggagacgctcttccagccttcctttatcggtggcctccggctccgctggtttgccggaatcaattttccctcatcccacgcctcagagtacggggtctcctcccgccggtgcccttagtctgactctggttgctcacactgcctctcccccgggccaccaggtatggagtctgcggggatccatgagaccacctacaacagcatcatgaagtgcgacatcgacatcaggaaggacctgtacgccaacaacgtcatgtcagggggcactaccatgtaccccggtatcgctgaccgcatgcagaaggagatcacagctctggctcccagcaccatgaagatcaaggtggatgacgcgcctggtacgggcggagaccaggggcggggggaactcgcaggcacctgacactcttgtcttgcagatcatcgccccccctgagcgcaagtactcagtgtggatcggcggctccatcctggcctcgctgtccaccttccagcagatgtggatcaccaagcaggagtacgacgaggccggcccctccattgtgcaccgcaaatgcttctaggcgcaccgcgtctgtgtacgcgctctctctcctcaggacgacaatcgaccatcgtgctatggttgcagggtggccccatcctccgccgtggctccatcgccgccactgcagccggcgcctgtttttgacgtgtacatagattcgctcgttttacctcattttgttatttttcaaacaaagccctgtggaaggaaatggaaaacttgaagcattaaagccagccattctgttttgctcc

SEQ ID NO: 12577 - protein, 377 aa, Rattus norvegicus
  ref <308>: DATABASE ACCESSION NUMBER: SWISS-Prot / CAA24529
  ref <309>: DATABASE ENTRY DATE: 2002-06-15
MCDEDETTALVCDNGSGLVKAGFAGDDAPRAVFPSIVGRPRHQGVMVGMGQKDSYVGDEAQSKRGILTLKYPIEHGIITNWDDMEKIWHHTFYNELRVAPEEHPTLLTEAPLNPKANREKMTQIMFETFNVPAMYVAIQAVLSLYASGRTTGIVLDSGDGVTHNVPIYEGYALPHAIMRLDLAGRDLTDYLMKILTERGYSFVTTAEREIVRDIKEKLCYVALDFENEMATAASSSSLEKSYELPDGQVITIGNERFRCPETLFQPSFIGMESAGIHETTYNSIMKCDIDIRKDLYANNVMSGGTTMYPGIADRMQKEITALAPSTMKIKIIAPPERKYSVWIGGSILASLSTFQQMWITKQEYDEAGPSIVHRKCF

SEQ ID NO: 12578 - DNA, 1374 bp, Homo sapiens
  ref <308>: DATABASE ACCESSION NUMBER: Refseq / NM_001100
  ref <309>: DATABASE ENTRY DATE: 2000-10-31
accgcagcggacagcgccaagtgaagcctcgcttccctcccgcggcgaccagggcccgagccgagagtagcagttgtagctacccgcccagaaactagacacaatgtgcgacgaagacgagaccaccgccctcgtgtgcgacaatggctccggcctggtgaaagccggcttcgccggggatgacgcccctagggccgtgttcccgtccatcgtgggccgcccccgacaccagggcgtcatggtcggtatgggtcagaaagattcctacgtgggcgacgaggctcagagcaagagaggtatcctgaccctgaagtaccctatcgagcacggcatcatcaccaactgggatgacatggagaagatctggcaccacaccttctacaacgagcttcgcgtggctcccgaggagcaccccaccctgctcaccgaggcccccctcaatcccaaggccaaccgcgagaagatgacccagatcatgtttgagaccttcaacgtgcccgccatgtacgtggccatccaggccgtgctgtccctctacgcctccggaaggaccaccggcatcgtgctggactccggcgacggcgtcacccacaacgtgcccatttatgagggctacgcgctgccgcacgccatcatgcgcctggacctggcgggccgcgatctcaccgactacctgatgaagatcctcactgagcgtggctactccttcgtgaccacagctgagcgcgagatcgtgcgcgacatcaaggagaagctgtgctacgtggccctggacttcgagaacgagatggcgacggccgcctcctcctcctccctggaaaagagctacgagctgccagacgggcaggtcatcaccatcggcaacgagcgcttccgctgcccggagacgctcttccagccctccttcatcggtatggagtcggcgggcattcacgagaccacctacaacagcatcatgaagtgtgacatcgacatcaggaaggacctgtatgccaacaacgtcatgtcggggggcaccacgatgtaccctgggatcgctgaccgcatgcagaaagagatcaccgcgctggcacccagcaccatgaagatcaagatcatcgccccgccggagcgcaaatactcggtgtggatcggcggctccatcctggcctcgctgtccaccttccagcagatgtggatcaccaagcaggagtacgacgaggccggcccttccatcgtccaccgcaaatgcttctaacacactccacctccagcacgcgacttctcaggacgacgaatcttctcaatgggggggcggctgagctccagccaccccgcagtcactttctttgtaacaacttccgttgctgccatcgtaaactgacacagtgtttg

SEQ ID NO: 12579 - protein, 377 aa, Homo sapiens; identical to SEQ ID NO: 12577
  ref <308>: DATABASE ACCESSION NUMBER: Refseq / NP_001091
  ref <309>: DATABASE ENTRY DATE: 2000-10-31

SEQ ID NO: 12580 - DNA, 312 bp, Rattus norvegicus
  ref <308>: DATABASE ACCESSION NUMBER: EMBL / J00797
  ref <309>: DATABASE ENTRY DATE: 2000-03-04
gggagagattacctcataccatgtcgcttgcaccaatcaccactctcctgtcgcggcttctctgggcagacggaggggtctggaccaacaggaaaggccttggcccatccccatggtgaccggagctgtatataaggggcgcatccggcccaagtgccggcaggttctcttacatcgaccgcttaagagtcgcgctgtaagaagcaacacctcctcctcgcctccgccatccacccggcagccgcgaagcagcaaccatggtgagcaaaccttcccgagttctcaggagcgggtgggtgtcagcccggctca

SEQ ID NO: 12581 - protein, 451 aa, Rattus norvegicus; identical to SEQ ID NO: 5831
  ref <308>: DATABASE ACCESSION NUMBER: SWISS-Prot / AAA42306
  ref <309>: DATABASE ENTRY DATE: 2002-06-15

SEQ ID NO: 12582 - DNA, 1657 bp, Homo sapiens; identical to SEQ ID NO: 9193
  ref <308>: DATABASE ACCESSION NUMBER: EMBL / AF141347
  ref <309>: DATABASE ENTRY DATE: 2001-09-24

SEQ ID NO: 12583 - protein, 451 aa, Homo sapiens; identical to SEQ ID NO: 5831
  ref <308>: DATABASE ACCESSION NUMBER: SWISS-Prot / AAD33871
  ref <309>: DATABASE ENTRY DATE: 2001-12-13

SEQ ID NO: 12584 - DNA, 6849 bp, Rattus norvegicus; identical to SEQ ID NO: 2387
  misc_feature (1)..(6849): n=a, c, g or t
  ref <308>: DATABASE ACCESSION NUMBER: EMBL / J01435
  ref <309>: DATABASE ENTRY DATE: 2002-10-25

SEQ ID NO: 12585 - DNA, 2509 bp, Rattus norvegicus; identical to SEQ ID NO: 2391
  ref <308>: DATABASE ACCESSION NUMBER: EMBL / J02596
  ref <309>: DATABASE ENTRY DATE: 2000-03-04

SEQ ID NO: 12586 - protein, 101 aa, Rattus norvegicus; identical to SEQ ID NO: 2392
  ref <308>: DATABASE ACCESSION NUMBER: SWISS-Prot / AAA40746
  ref <309>: DATABASE ENTRY DATE: 2002-06-15

SEQ ID NO: 12587 - DNA, 533 bp, Homo sapiens; identical to SEQ ID NO: 2393
  ref <308>: DATABASE ACCESSION NUMBER: Refseq / NM_000040
  ref <309>: DATABASE ENTRY DATE: 2002-11-05

SEQ ID NO: 12588 - protein, 99 aa, Homo sapiens; identical to SEQ ID NO: 2394
  ref <308>: DATABASE ACCESSION NUMBER: Refseq / NP_000031
  ref <309>: DATABASE ENTRY DATE: 2002-11-05

SEQ ID NO: 12589 - DNA, 1580 bp, Rattus norvegicus; identical to SEQ ID NO: 2407
  ref <308>: DATABASE ACCESSION NUMBER: EMBL / J02749
  ref <309>: DATABASE ENTRY DATE: 2000-03-04

SEQ ID NO: 12590 - protein, 425 aa, Rattus norvegicus
  misc_feature (1)..(425): Xaa=Unknown amino acid
MHRLQVVLGHLAGRSESSSALQAAPCSAGFPQASASDVVVVHGQRTPIGRAGRGGFKDTTPDELLSAVLTAVLQDVKPKPECLGDISVGNVLQPGAGAAMARIAQFLSGIPETVPLSAVNRQCSSGLQAVANIAGGIRNGSYDIGMACGVESMTLSERGNPGNISSRLLENEKARDCLIPMGITSENVAERFGISRQKQDAFALASQQKAASAQSKGCFRAEIVPVTTTVLDDKGDRKTITVSQDEGVRPSTTMEGLAKLKPAFKDGGSTTAGNSSQVSDGAAAVLLARRSKAEELGLPILGVLRSYAVVGVPPDIMGIGPAYAIPAALQKAGLTVNDIDIFEINEAFASQALYCVEKLGIPAEKVNPLGGAIALGHPLGCTGARQVVTLLNELKRRGRRAYGVVSMCIGTGMGAAAVFEYPGNX

SEQ ID NO: 12591 - DNA, 1391 bp, Homo sapiens; identical to SEQ ID NO: 2409
  ref <308>: DATABASE ACCESSION NUMBER: EMBL / X12966
  ref <309>: DATABASE ENTRY DATE: 1993-09-12

SEQ ID NO: 12592 - protein, 424 aa, Homo sapiens; identical to SEQ ID NO: 2410
  ref <308>: DATABASE ACCESSION NUMBER: SWISS-Prot / XUHUAB
  ref <309>: DATABASE ENTRY DATE: 2002-06-15

SEQ ID NO: 12593 - DNA, 1580 bp, Rattus norvegicus; identical to SEQ ID NO: 2407
  ref <308>: DATABASE ACCESSION NUMBER: EMBL / J02749
  ref <309>: DATABASE ENTRY DATE: 2000-03-04

SEQ ID NO: 12594 - protein, 425 aa, Rattus norvegicus; identical to SEQ ID NO: 12590
  misc_feature (1)..(425): Xaa=Unknown amino acid

SEQ ID NO: 12595 - DNA, 1391 bp, Homo sapiens; identical to SEQ ID NO: 2409
  ref <308>: DATABASE ACCESSION NUMBER: EMBL / X12966
  ref <309>: DATABASE ENTRY DATE: 1993-09-12

SEQ ID NO: 12596 - protein, 424 aa, Homo sapiens; identical to SEQ ID NO: 2410
  ref <308>: DATABASE ACCESSION NUMBER: SWISS-Prot / XUHUAB
  ref <309>: DATABASE ENTRY DATE: 2002-06-15

SEQ ID NO: 12597 - DNA, 1671 bp, Rattus norvegicus; identical to SEQ ID NO: 2443
  ref <308>: DATABASE ACCESSION NUMBER: EMBL / J03179
  ref <309>: DATABASE ENTRY DATE: 2000-03-04

SEQ ID NO: 12598 - protein, 325 aa, Rattus norvegicus; identical to SEQ ID NO: 2444
  ref <308>: DATABASE ACCESSION NUMBER: SWISS-Prot / AAA41083
  ref <309>: DATABASE ENTRY DATE: 2000-05-30

SEQ ID NO: 12599 - DNA, 1403 bp, Homo sapiens
  ref <308>: DATABASE ACCESSION NUMBER: Refseq / NM_001352
  ref <309>: DATABASE ENTRY DATE: 2002-11-05
caaatccgtgctcctagatttgcaggttctgatactgtggttcgagctacactcgccgcctgggcagacactcgtccaaaccactggagtgtgctggtgatcgcagccagcccttcgcctctccatgaacccgtgagcctggggcaggtgccaggcgatggcgcggcctgtgagcgacaggaccccggcccctctgctgctgggcggcccggccgggacaccccctggcgggggagcgctgcttgggttgcggagccttctgcaggggaccagcaagcccaaagagccggccagctgtctcctgaaggaaaaggagcgcaaggcggccctgcctgcagccacaacccctgggccaggcctggagactgcgggcccggcggatgccccggctggggcagtggtgggcggagggtccccgcgggggcgcccggggccggtgcccgccccgggtctgttggcgccactgctgtgggagcgcacgctgccgttcggcgatgtggagtacgtagacctggacgccttcctgctggagcacgggctcccgcccagcccgccgccccccggtggcccgtcgccggagccgtcgcccgcgcggacgcccgcaccctccccagggccgggttcgtgcggctcggcttccccccgctcctctcctgggcacgcccccgcccgggctgccctcgggaccgccacgggccaccgcgcaggcctgacctctcgggacacacccagccctgtggacccagacaccgtggaggtgttgatgacctttgaacccgacccagctgatcttgccctatcaagcattcctggccacgagacctttgaccctcgaagacatcgcttctcagaagaggaacttaagccccagccaatcatgaagaaggcaagaaaaatccaggtgccggaggagcagaaggatgagaaatactggagccggcggtacaagaacaacgaggcagccaagcggtcccgtgacgcccggcggctcaaggagaaccagatatcggtgcgggcggccttcctggagaaggagaacgccctgctgcggcaggaagttgtggccgtgcgccaggagctgtcccactaccgcgccgtgctgtcccgataccaggcccagcacggggccctgtgaggctgccccacatccccacctggcaggcgtctcctccgcttgctgagacttacgccctgttcccttcctgccctgtgcccacgggccggccagctgggtgccccagggacgtgataatgcagataaatacatttatatttttaagaaaaagcgagcctcccccctcttgcgggggcggggagggttctctgtgtgtccccggcacgtcagggaccctatcctcccaccgcctccgttaacacgatcctgaataaatcttgagaacccc

SEQ ID NO: 12600 - protein, 325 aa, Homo sapiens
  ref <308>: DATABASE ACCESSION NUMBER: Refseq / NP_001343
  ref <309>: DATABASE ENTRY DATE: 2002-11-05
MARPVSDRTPAPLLLGGPAGTPPGGGALLGLRSLLQGTSKPKEPASCLLKEKERKAALPAATTPGPGLETAGPADAPAGAVVGGGSPRGRPGPVPAPGLLAPLLWERTLPFGDVEYVDLDAFLLEHGLPPSPPPPGGPSPEPSPARTPAPSPGPGSCGSASPRSSPGHAPARAALGTATGHRAGLTSRDTPSPVDPDTVEVLMTFEPDPADLALSSIPGHETFDPRRHRFSEEELKPQPIMKKARKIQVPEEQKDEKYWSRRYKNNEAAKRSRDARRLKENQISVRAAFLEKENALLRQEVVAVRQELSHYRAVLSRYQAQHGAL

SEQ ID NO: 12601 - DNA, 1671 bp, Rattus norvegicus; identical to SEQ ID NO: 2443
  ref <308>: DATABASE ACCESSION NUMBER: EMBL / J03179
  ref <309>: DATABASE ENTRY DATE: 2000-03-04

SEQ ID NO: 12602 - protein, 325 aa, Rattus norvegicus; identical to SEQ ID NO: 2444
  ref <308>: DATABASE ACCESSION NUMBER: SWISS-Prot / AAA41083
  ref <309>: DATABASE ENTRY DATE: 2000-05-30

SEQ ID NO: 12603 - DNA, 1403 bp, Homo sapiens; identical to SEQ ID NO: 12599
  ref <308>: DATABASE ACCESSION NUMBER: Refseq / NM_001352
  ref <309>: DATABASE ENTRY DATE: 2002-11-05

SEQ ID NO: 12604 - protein, 325 aa, Homo sapiens; identical to SEQ ID NO: 12600
  ref <308>: DATABASE ACCESSION NUMBER: Refseq / NP_001343
  ref <309>: DATABASE ENTRY DATE: 2002-11-05

SEQ ID NO: 12605 - DNA, 1725 bp, Rattus norvegicus
  ref <308>: DATABASE ACCESSION NUMBER: EMBL / J03637
  ref <309>: DATABASE ENTRY DATE: 2000-03-04
gaattcctgctgcacccatatttgaatattgttttatcctcatcacgcgaacttcctggggaaggactccaaggtccaagtgggcgggaaggagggtccttaaatgtgccctctttcagctcttgctcattccaggagtcccagctgctggagaaggctgtgtaggagttgcaatgagcagtatcagtgacaccgtgaaacgggccagggaggcctttaactccggcaagactcgatcgctgcagttccgaatccagcagttggaggcgctgcagcgcatgatcaatgagaacctgaaaagcatctctggggcgctggcctctgacctgggcaagaacgaatggacctcctactatgaggaagtggctcacgtactggaggagcttgataccacaattaaggagctccctgattgggctgaggatgagcctgtggccaagactcgccagacccagcaggatgacctctacatccactcggagcccctgggtgtggtccttgtcataggtgcttggaactaccccttcaacctcaccatccagcccatggtgggtgccgttgctgcaggaaacgcagtgatcctcaagccctcagaagtgagcgggcacatggcagacctgctagcgacactcatccctcagtatatggaccagaatctgtacctagtggtcaaagggggtgtccctgaaaccacggagctgctcaaagagaggtttgaccacatcatgtacactgggagcacagccgtagggaagattgttatggccgctgccgccaagcatctgactcctgtcaccctggagcttggagggaaaagcccttgttacgtggacaaggactgtgatctagatgtggcttgcaggcgtatcgcctgggggaaatttatgaacagtggccagacctgtgtggccccagactacatcctctgtgacccctcgattcagaaccaaatcgtggagaagctcaagaagtcactcaaagatttctatggggaagatgctaagcagtcccgtgattatgggaggatcatcaatgaccgtcacttccagcgggtcaaaggcctgattgacaaccagaaagtagcccatggaggcacttgggaccagtcctcacgatacatagctccaaccatcctggtggatgtggacccccagtccccagtgatgcaggaggagatctttgggccggtgatgcccattgtgtgtgttcgaagcttggaggaggccattcaatttatcaaccagcgtgagaagcccctggcactctatgtgttctccaacaatgagaaggtgatcaagaaaatgatcgcagagacatccagcggtggagtgacagccaatgacgtcattgttcacatcaccgtgcccactttgccctttggtggtgtggggaacagcggcatgggggcctaccatggcaagaaaagcttcgagaccttctcccaccgccgctcttgcctggtgaagtctctgttgaatgaagaagctcacaaggccaggtatcccccaagcccagccaagatgccccggcactgagagagtgctgctgcacctgacacatgttttgctggctgtcttgtccttgaggagttgctcatggagcctcatcctggcttattcccacctgccgtcctgtgcttaactccccgaaggactctcacctcactcctccaaattccactgtttgctgggcacagaaatcaataaaagcctctgaggaaaagtc

SEQ ID NO: 12606 - protein, 452 aa, Rattus norvegicus
  ref <308>: DATABASE ACCESSION NUMBER: SWISS-Prot / AAA40713
  ref <309>: DATABASE ENTRY DATE: 2002-06-15
SSISDTVKRAREAFNSGKTRSLQFRIQQLEALQRMINENLKSISGALASDLGKNEWTSYYEEVAHVLEELDTTIKELPDWAEDEPVAKTRQTQQDDLYIHSEPLGVVLVIGAWNYPFNLTIQPMVGAVAAGNAVILKPSEVSGHMADLLATLIPQYMDQNLYLVVKGGVPETTELLKERFDHIMYTGSTAVGKIVMAAAAKHLTPVTLELGGKSPCYVDKDCDLDVACRRIAWGKFMNSGQTCVAPDYILCDPSIQNQIVEKLKKSLKDFYGEDAKQSRDYGRIINDRHFQRVKGLIDNQKVAHGGTWDQSSRYIAPTILVDVDPQSPVMQEEIFGPVMPIVCVRSLEEAIQFINQREKPLALYVFSNNEKVIKKMIAETSSGGVTANDVIVHITVPTLPFGGVGNSGMGAYHGKKSFETFSHRRSCLVKSLLNEEAHKARYPPSPAKMPRH

SEQ ID NO: 12607 - DNA, 1718 bp, Homo sapiens
  ref <308>: DATABASE ACCESSION NUMBER: EMBL / BC004370
  ref <309>: DATABASE ENTRY DATE: 2001-07-13
cagttaccgggagaggctgtgtcaaaggcgccatgagcaagatcagcgaggccgtgaagcgcgcccgcgccgccttcagctcgggcaggacccgtccgctgcagttccggatccagcagctggaggcgctgcagcgcctgatccaggagcaggagcaggagctggtgggcgcgctggccgcagacctgcacaagaatgaatggaacgcctactatgaggaggtggtgtacgtcctagaggagatcgagtacatgatccagaagctccctgagtgggccgcggatgagcccgtggagaagacgccccagactcagcaggacgagctctacatccactcggagccactgggcgtggtcctcgtcattggcacctggaactaccccttcaacctcaccatccagcccatggtgggcgccatcgctgcagggaacgcagtggtcctcaagccctcggagctgagtgagaacatggcgagcctgctggctaccatcatcccccagtacctggacaaggatctgtacccagtaatcaatgggggtgtccctgagaccacggagctgctcaaggagaggttcgaccatatcctgtacacgggcagcacgggggtggggaagatcatcatgacggctgctgccaagcacctgacccctgtcacgctggagctgggagggaagagtccctgctacgtggacaagaactgtgacctggacgtggcctgccgacgcatcgcctgggggaaattcatgaacagtggccagacctgcgtggccccagactacatcctctgtgacccctcgatccagaaccaaattgtggagaagctcaagaagtcactgaaagagttctacggggaagatgctaagaaatcccgggactatggaagaatcattagtgcccggcacttccagagggtgatgggcctgattgagggccagaaggtggcttatgggggcaccggggatgccgccactcgctacatagcccccaccatcctcacggacgtggacccccagtccccggtgatgcaagaggagatcttcgggcctgtgctgcccatcgtgtgcgtgcgcagcctggaggaggccatccagttcatcaaccagcgtgagaagcccctggccctctacatgttctccagcaacgacaaggtgattaagaagatgattgcagagacatccagtggtggggtggcggccaacgatgtcatcgtccacatcaccttgcactctctgcccttcgggggcgtggggaacagcggcatgggatcctaccatggcaagaagagcttcgagactttctctcaccgccgctcttgcctggtgaggcctctgatgaatgatgaaggcctgaaggtcagataccccccgagcccggccaagatgacccagcactgaggaggggttgctccgcctggcctggccatactgtgtcccatcggagtgcggaccaccctcactggctctcctggccctgggagaatcgctcctgcagccccagcccagccccactcctctgctgacctgctgacctgtgcacaccccactcccacatgggcccaggcctcaccattccaagtctccacccctttctagaccaataaagagacaaatacaattttctaactcagcaaaaaaaaaaaaaaaaaaaaaaaaaaaaaaaaaaaaaaaaaaaaaaaaaaaaaaaaaaaaaaaaaaaaaaaaaaaaaaaaaaaacccccg

SEQ ID NO: 12608 - protein, 453 aa, Homo sapiens [sequence omitted]

SEQ ID NO: 12609 - DNA, 5106 bp, Rattus norvegicus
  ref <308>: DATABASE ACCESSION NUMBER: EMBL / J03806
  ref <309>: DATABASE ENTRY DATE: 2000-03-04
cgctcgcctcccgggccgccgccgccgcctccgcctccgcctccgcctccgccgccccgggcccgccggcttgcgtcgccgaggtcgctgcagcatggcgggcgtcgggaccccctgcgccaacggctgcgggcccagcgcgccctccgaagcggaggtgctgcacctctgccgcagcctcgaggtgggcaccgtcatgactttgttctactccaagaagtcgcagcggccagaacggaagaccttccaggtcaagttggagacgcgccagatcacatggagccgcggtgcggacaaaatcgaggggtccatcgatatccgagaaatcaaggagatccgcccagggaagacttcccgggactttgaccgctaccaagaagaccctgccttccggccagatcagtcacactgttttgtcatcctctatggaatggaattccgcctgaagaccctgagcctgcaagccacatctgaggatgaagtgaacatgtggatcaagggcttaacttggctcatggaagatacgctgcaggcggccacacccctgcaaattgagagatggctccggaagcagttctactcagtggatcgtaaccgagaggatcgtatatcagccaaggacctgaagaacatgctgtcacaggtcaactaccgggtccccaacatgcgcttcctccgagagcggctgacggactttgaacagcgcagcggggacatcacctatgggcagtttgctcagctttaccgcagcctcatgtacagcgcccagaagacgatggaccttccgttcttggaaaccaacactttgaggactggagagcggccagagctttgccaggtgtccctttctgagttccagcagttccttcttgagtaccagggggagctgtgggctgtcgaccggcttcaggtgcaggaatttatgctcagcttccttcgagaccccttgcgagagattgaggagccatacttcttcttggatgagcttgtcacctttctgttctccaaagagaacagtgtgtggaactcacagctggatgccgtgtgcccagaaaccatgaacaacccactgtctcactattggatctcttcctcgcataatacgtatctgactggggaccagttctccagcgagtcctccctggaagcctacgctcgctgcctgaggatgggctgtcgctgcatcgagttggactgctgggatgggccagatgggatgccagtcatttaccatgggcacaccctcaccaccaagattaagttctcagatgtcctgcacaccatcaaggagcacgcgttcgtagcctcagagtaccctgtcatcctgtccatcgaggaccactgcagcattgcccagcagaggaacatggcccagcacttcaggaaggtgctcggtgacacgctcctcaccaagcccgtggacattgccgctgatgggctcccttctcccaaccagctcaagaggaagatcctgattaagcataagaagctggctgagggcagtgcctatgaggaggtgcctacctctgtgatgtactctgagaatgacatcagtaactccatcaagaatggtatcctctacttggaggaccccgtgaatcatgagtggtacccccactactttgttctgactagcagcaagatctactactctgaggagaccagcagtgaccagggaaatgaggatgaagaggagccgaaggaggccagtggcagcacagagctgcactcgagcgagaagtggttccacgggaagctcggggctgggcgcgacgggcggcacattgctgagcgcctgctcaccgagtactgcatagagactggggctcccgatggctccttcctagtgcgagaaagtgagaccttcgtgggggactacacgctgtctttttggcggaatgggaaagtccagcactgccgtatccactcccggcaggatgctgggactcctaagttcttcttgacagataaccttgtctttgactctctctatgacctcatcacacattatcagcaagtgcccctgcgctgcaatgagtttgagatgcgcctttcagagcctgttccacagacgaatgcccatgagagcaaagagtggtaccacgcaagcctgactagagctcaggctgaacacatgctgatgcgagtaccccgtgatggggccttcctggtgcggaagcgcaacgagcccaactcctatgccatctctttccgggctgagggaaagatcaagcactgccgagtacagcaggaaggccagactgtgatgctggggaactctgagtttgacagcctggtcgacctcatcagctactatgagaagcatcccctgtaccgcaaaatgaaactgcgctaccccatcaacgaggaggcgctggagaagattgggacagctgaacccgattatggggcactgtatgagggccgcaaccctggtttctatgtggaggccaaccctatgccaactttcaagtgtgcagtaaaagctctcttcgactacaaggcccagagagaggatgagctgacttttaccaagagcgccatcatccagaatgtggaaaagcaagatggtggctggtggcgtggggactatggtgggaagaagcagctgtggttcccctcaaactatgtggaagagatgatcaatccagcaatcctagagccggagagggagcatctggatgagaacagcccactgggggacttgctgcgaggggtcttagatgtgccagcctgccagatcgccattcgtcctgagggcaaaaacaaccggctcttcgtcttctccatcagcatgccgtcagtggctcagtggtccctagacgttgccgctgactcacaggaggagttgcaggactgggtgaaaaagatccgtgaagttgcccagactgcagatgccaggcttactgaggggaagatgatggagaggaggaagaagatcgccttggagctctccgagctcgtggtctactgccggcctgttccctttgacgaagagaagattggcacagaacgcgcttgttaccgggacatgtcctcctttccggaaaccaaggctgagaagtatgtgaacaaggccaaaggcaagaagttcctccagtacaaccggctgcagctctctcgcatctaccctaagggtcagaggctggactcctccaattatgaccctctgcccatgtggatctgtggcagccagcttgtagctctcaattttcagaccccagacaagcctatgcagatgaaccaggccctcttcatggctggtggacactgtggctatgtgctgcagccaagcaccatgagagatgaagcctttgacccctttgataagagcagtctccgaggtctggagccctgtgtcatttgcattgaggtgctgggggccaggcatctgccgaagaatggccggggtattgtgtgtcctttcgtggagattgaagtggctggggcagagtacgacagcaccaagcagaagacagagtttgtagtggacaatggactgaaccctgtgtggcctgcaaagcccttccacttccagatcagtaacccagagtttgcctttctgcgctttgtggtgtatgaggaagacatgtttagtgaccagaacttcttggctcaggctactttcccagtaaaaggcctgaagacaggatacagagcagtgcctttgaagaacaactacagtgaagacctggagttggcctccctgctcatcaagattgacattttccctgctaaggagaatggtgacctcagccctttcagtggtacatccctaagggaacgggcctcagatgcctccagccagctgttccatgtccgggcccgggaagggtcctttgaagccagataccagcagccatttgaagacttccgcatctcgcaggagcatctcgcagaccattttgacagtcgggaacgaagggccccaagaaggactcgggtcaatggagacaaccgcctctagtcatgcccctaccttgttggagagcagcagcgctgccacctgtggaatgccatgaactgggttctctgggagcggtctactgtaaagccttcctggtctcacagcctggagcctggattccagcggtgaaggctagacaaaaccaagccattaatgagatgtactgttttgggcctccatgcccagctctgggtgaaggcaaaaaactgtactgtgtctcgcattaagcacacacatctggccctgaatgtggaggtgggtccctccatcttgggccaggactagggctgaagccccttggaaagagaagttgcctcagttggtggcataggaagcttcaaggagctgctgacacattcctgaaagaggaagaggaggaggaggaagagccttgctgggccaggggaacaaagtttacattgtcctgtagctttaaaaccacagctggtcagggtgaaagagtagatgccctgaggcttggccctggagccaggtcagaggaatgcagggcctgtaaggagaaggctctgctctgcctgaggaggaagacagcacaagggcacattgccaccgtgggtatactacccagcctgaaagatacaggggatcatgataaatagcagtattatttttttttttcttctcagtggtattgtgactaagttattctgtcctgctcctcaccttggaagggaagacccagcacagagcctttaggaacagcagctctatggggtgttgttactggaagagggcactgtccagaagggtggaggggcagaaagagagaaaatcgatgtctaccctggtgagcgtttttgtttttatggcaaggaaggctcattatgctctcccaaaggaatggagacatgggtaagtggagtcaggcagtaggcaccaaatgaagctgctgcttggtagtctctgtgtggttggtaaaaagatgcaaaggagatgggaaggtaagcctcacctctgaggacagggtggggtccaggcctgtgggtgcaaaggtgcctcagcatagccagcattcagcacacgcaaacccactgcccacatttgggctcagggttggccatttgctagttctgctgccctcttaagatctgactgccaaataaatcatcctcatgtcc

SEQ ID NO: 12610 - protein, 1290 aa, Rattus norvegicus
  ref <308>: DATABASE ACCESSION NUMBER: PIR / A31317
  ref <309>: DATABASE ENTRY DATE: 2000-03-31
MAGVGTPCANGCGPSAPSEAEVLHLCRSLEVGTVMTLFYSKKSQRPERKTFQVKLETRQITWSRGADKIEGSIDIREIKEIRPGKTSRDFDRYQEDPAFRPDQSHCFVILYGMEFRLKTLSLQATSEDEVNMWIKGLTWLMEDTLQAATPLQIERWLRKQFYSVDRNREDRISAKDLKNMLSQVNYRVPNMRFLRERLTDFEQRSGDITYGQFAQLYRSLMYSAQKTMDLPFLETNTLRTGERPELCQVSLSEFQQFLLEYQGELWAVDRLQVQEFMLSFLRDPLREIEEPYFFLDELVTFLFSKENSVWNSQLDAVCPETMNNPLSHYWISSSHNTYLTGDQFSSESSLEAYARCLRMGCRCIELDCWDGPDGMPVIYHGHTLTTKIKFSDVLHTIKEHAFVASEYPVILSIEDHCSIAQQRNMAQHFRKVLGDTLLTKPVDIAADGLPSPNQLKRKILIKHKKLAEGSAYEEVPTSVMYSENDISNSIKNGILYLEDPVNHEWYPHYFVLTSSKIYYSEETSSDQGNEDEEEPKEASGSTELHSSEKWFHGKLGAGRDGRHIAERLLTEYCIETGAPDGSFLVRESETFVGDYTLSFWRNGKVQHCRIHSRQDAGTPKFFLTDNLVFDSLYDLITHYQQVPLRCNEFEMRLSEPVPQTNAHESKEWYHASLTRAQAEHMLMRVPRDGAFLVRKRNEPNSYAISFRAEGKIKHCRVQQEGQTVMLGNSEFDSLVDLISYYEKHPLYRKMKLRYPINEEALEKIGTAEPDYGALYEGRNPGFYVEANPMPTFKCAVKALFDYKAQREDELTFTKSAIIQNVEKQDGGWWRGDYGGKKQLWFPSNYVEEMINPAILEPEREHLDENSPLGDLLRGVLDVPACQIAIRPEGKNNRLFVFSISMPSVAQWSLDVAADSQEELQDWVKKIREVAQTADARLTEGKMMERRKKIALELSELVVYCRPVPFDEEKIGTERACYRDMSSFPETKAEKYVNKAKGKKFLQYNRLQLSRIYPKGQRLDSSNYDPLPMWICGSQLVALNFQTPDKPMQMNQALFMAGGHCGYVLQPSTMRDEAFDPFDKSSLRGLEPCVICIEVLGARHLPKNGRGIVCPFVEIEVAGAEYDSTKQKTEFVVDNGLNPVWPAKPFHFQISNPEFAFLRFVVYEEDMFSDQNFLAQATFPVKGLKTGYRAVPLKNNYSEDLELASLLIKIDIFPAKENGDLSPFSGTSLRERASDASSQLFHVRAREGSFEARYQQPFEDFRISQEHLADHFDSRERRAPRRTRVNGDNRL

SEQ ID NO: 12611 - DNA, 4408 bp, Homo sapiens
  ref <308>: DATABASE ACCESSION NUMBER: EMBL / M34667
  ref <309>: DATABASE ENTRY DATE: 2000-03-04
ggggtgccgccgccgccgttgcgcttgctcccgggcggtcctggcctgtgccgccgccgcccccagcgtcggagccatggcgggcgccgcgtccccttgcgccaacggctgcgggcccggcgcgccctcggacgccgaggtgctgcacctctgccgcagcctcgaggtgggcaccgtcatgactttgttctactccaagaagtcgcagcgacccgagcggaagaccttccaggtcaagctggagacgcgccagatcacgtggagccggggcgccgacaagatcgagggggccattgacattcgtgaaattaaggagatccgcccagggaagacctcacgggactttgatcgctatcaagaggacccagctttccggccggaccagtcacattgctttgtcattctctatggaatggaatttcgcctgaaaacgctgagcctgcaagccacatctgaggatgaagtgaacatgtggatcaagggcttaacttggctgatggaggatacattgcaggcacccacacccctgcagattgagaggtggctccggaagcagttttactcagtggatcggaatcgtgaggatcgtatatcagccaaggacctgaagaacatgctgtcccaggtcaactaccgggtccccaacatgcgcttcctccgagagcggctgacggacctggagcagcgcagcggggacatcacctacgggcagtttgctcagctgtaccgcagcctcatgtacagcgcccagaagacgatggacctccccttcttggaagccagtactctgagggctggggagcggccggagctttgccgagtgtcccttcctgagttccagcagttccttcttgactaccagggggagctgtgggctgttgatcgcctccaggtgcaggagttcatgctcagcttcctccgagaccccttacgagagatcgaggagccatacttcttcctggatgagtttgtcaccttcctgttctccaaagagaacagtgtgtggaactcgcagctggatgcagtatgcccggacaccatgaacaaccctctttcccactactggatctcctcctcgcacaacacgtacctgaccggggaccagttctccagtgagtcctccttggaagcctatgctcgctgcctgcggatgggctgtcgctgcattgagttggactgctgggacggcccggatgggatgccagttatttaccatgggcacacccttaccaccaagatcaagttctcagatgtcctgcacaccatcaaggagcatgcctttgtggcctcagagtacccagtcatcctgtccattgaggaccactgcagcattgcccagcagagaaacatggcccaatacttcaagaaggtgctgggggacacactcctcaccaagcccgtggagatctctgccgacgggctcccctcacccaaccagcttaagaggaagatcctcatcaagcacaagaagctggctgagggcagtgcctacgaggaggtgcctacatccatgatgtactctgagaacgacatcagcaactctatcaagaatggcatcctctacctggaggaccctgtgaaccacgaatggtatccccactactttgttctgaccagcagcaagatctactactctgaggagaccagcagtgaccagggcaacgaggatgaggaggagcccaaggaggtcagcagcagcacagagctgcactccaatgagaagtggttccatgggaagctaggggcagggcgtgacgggcgtcacatcgctgagcgcctgcttactgagtactgcatcgagaccggagcccctgacggctccttcctcgtgcgagagagtgagaccttcgtgggcgactacacgctctctttctggcggaacgggaaagtccagcactgccgtatccactcccggcaagatgctgggacccccaagttcttcttgacagacaacctcgtctttgactccctctatgacctcatcacgcactaccagcaggtgcccctgcgctgtaatgagtttgagatgcgactttcagagcctgtcccacagaccaacgcccacgagagcaaagagtggtaccacgcgagcctgaccagagcacaggctgagcacatgctaatgcgcgtccctcgtgatggggccttcctggtgcggaagcggaatgaacccaactcatatgccatctctttccgggctgagggcaagatcaagcattgccgtgtccagcaagagggccagacagtgatgctagggaactcggagttcgacagccttgttgacctcatcagctactatgagaaacacccgctataccgcaagatgaagctgcgctatcccatcaacgaggaggcactggagaagattggcacagctgagcctgactacggggccctgtatgagggacgcaaccctggcttctatgtagaggcaaaccctatgccaactttcaagtgtgcagtcaaagccctctttgactacaaggcccagagggaggacgagctgaccttcatcaagagcgccatcatccagaatgtggagaagcaagagggaggctggtggcgaggggactacggagggaagaagcagctgtggttcccatcaaactacgtggaagagatggtcaaccccgtggccctggagccggagagggagcacttggacgagaacagccccctaggggacttgctgcggggggtcttggatgtgccggcttgtcagattgccatccgtcctgagggcaagaacaaccggctcttcgtcttctccatcagcatggcgtcggtggcccactggtccctggatgttgctgccgactcacaggaggagctgcaggactgggtgaaaaagatccgtgaagtggcccagacagcagacgccaggctcactgaagggaagataatggaacggaggaagaagattgccctggagctctctgaacttgtcgtctactgccggcctgttccctttgatgaagagaagattggcacagaacgtgcttgctaccgggacatgtcatccttcccggaaaccaaggctgagaaatacgtgaacaaggccaaaggcaagaagttccttcagtacaatcgactgcagctctcccgcatctaccccaagggccagcgactggattcctccaactacgatcctttgcccatgtggatctgtggcagtcagcttgtggccctcaacttccagacccctgacaagcctatgcagatgaaccaggccctcttcatgacgggcaggcactgtggctacgtgctgcagccaagcaccatgcgggatgaggccttcgacccctttgacaagagcagcctccgcgggctggagccatgtgccatctctattgaggtgctgggggcccgacatctgccaaagaatggccgaggcattgtgtgtccttttgtggagattgaggtggctggagctgagtatgacagcaccaagcagaagacagagtttgtggtggacaatggactcaaccctgtatggccagccaagcccttccacttccagatcagtaaccctgaatttgcctttctgcgcttcgtggtgtatgaggaagacatgtttagtgaccagaatttcctggctcaggctactttcccagtaaaaggcctgaagacaggatacagagcagtgcctttgaagaacaactacagtgaggacctggagttggcctccctgctgatcaagattgacattttccctgccaaggagaatggtgacctcagtcccttcagtggtacgtccctgcgggagcggggctcagatgcctcaggccagctgtttcatggccgagcccgggaaggctcctttgaatcccgctaccagcagccgtttgaggacttccgcatctcccaggagcatctcgcagaccattttgacagtcgagaacgaagggccccaagaaggactcgggtcaatggagacaaccgcctctagttgtaccccagcctcgttggagagcagcaggtgctgtgcgccttgtagaatgccgcgaactgggttctttggaagcagccccctgtggcggccttccgggtctcgcagcctgaagcctggattccagcagtgaatgctagacagaaaccaagccattaatgagatgttattactgttttgggcctccatgccccagctctggatgaaggcaaaaactgtactgtgtttcgcattaagcacacacatctggccctgacttctggagatggatccttccatcttgtggggccaggaccatggccgaagccccttggagagagaggctgcctcagccagtggcacaggagactccaaggagctactgacattcctaagagtggaggaggaggaggagccttgctgggccagggaaacaaagtttacattgtcctgtagctttaaaaccacagctgggcaggg

SEQ ID NO: 12612 - protein, 1290 aa, Homo sapiens
  ref <308>: DATABASE ACCESSION NUMBER: SWISS-Prot / P19174
  ref <309>: DATABASE ENTRY DATE: 2002-06-15
MAGAASPCANGCGPGAPSDAEVLHLCRSLEVGTVMTLFYSKKSQRPERKTFQVKLETRQITWSRGADKIEGAIDIREIKEIRPGKTSRDFDRYQEDPAFRPDQSHCFVILYGMEFRLKTLSLQATSEDEVNMWIKGLTWLMEDTLQAPTPLQIERWLRKQFYSVDRNREDRISAKDLKNMLSQVNYRVPNMRFLRERLTDLEQRSGDITYGQFAQLYRSLMYSAQKTMDLPFLEASTLRAGERPELCRVSLPEFQQFLLDYQGELWAVDRLQVQEFMLSFLRDPLREIEEPYFFLDEFVTFLFSKENSVWNSQLDAVCPDTMNNPLSHYWISSSHNTYLTGDQFSSESSLEAYARCLRMGCRCIELDCWDGPDGMPVIYHGHTLTTKIKFSDVLHTIKEHAFVASEYPVILSIEDHCSIAQQRNMAQYFKKVLGDTLLTKPVEISADGLPSPNQLKRKILIKHKKLAEGSAYEEVPTSMMYSENDISNSIKNGILYLEDPVNHEWYPHYFVLTSSKIYYSEETSSDQGNEDEEEPKEVSSSTELHSNEKWFHGKLGAGRDGRHIAERLLTEYCIETGAPDGSFLVRESETFVGDYTLSFWRNGKVQHCRIHSRQDAGTPKFFLTDNLVFDSLYDLITHYQQVPLRCNEFEMRLSEPVPQTNAHESKEWYHASLTRAQAEHMLMRVPRDGAFLVRKRNEPNSYAISFRAEGKIKHCRVQQEGQTVMLGNSEFDSLVDLISYYEKHPLYRKMKLRYPINEEALEKIGTAEPDYGALYEGRNPGFYVEANPMPTFKCAVKALFDYKAQREDELTFIKSAIIQNVEKQEGGWWRGDYGGKKQLWFPSNYVEEMVNPVALEPEREHLDENSPLGDLLRGVLDVPACQIAIRPEGKNNRLFVFSISMASVAHWSLDVAADSQEELQDWVKKIREVAQTADARLTEGKIMERRKKIALELSELVVYCRPVPFDEEKIGTERACYRDMSSFPETKAEKYVNKAKGKKFLQYNRLQLSRIYPKGQRLDSSNYDPLPMWICGSQLVALNFQTPDKPMQMNQALFMTGRHCGYVLQPSTMRDEAFDPFDKSSLRGLEPCAISIEVLGARHLPKNGRGIVCPFVEIEVAGAEYDSTKQKTEFVVDNGLNPVWPAKPFHFQISNPEFAFLRFVVYEEDMFSDQNFLAQATFPVKGLKTGYRAVPLKNNYSEDLELASLLIKIDIFPAKENGDLSPFSGTSLRERGSDASGQLFHGRAREGSFESRYQQPFEDFRISQEHLADHFDSRERRAPRRTRVNGDNRL

SEQ ID NO: 12613 - DNA, 5224 bp, Rattus norvegicus
  ref <308>: DATABASE ACCESSION NUMBER: EMBL / J03914
  ref <309>: DATABASE ENTRY DATE: 2000-03-04
aaggcagggagttgacggtgaagaaggaacaatgccaggaagataatgaacagggttgcactttgcccatcaaaagtctctaactgcacatctggtggaaacagcacaccagagcaagaacagggagctgccgacacaggtgctagcccattcctgtctttgattactgactgcttagactggttcctgagccagtatagatatatttttttccctgtccctggatccatagctccttcccccaacaatccctcccgtggaatgtctgaaatttgaaacactgtaggccaatggtccaatagaaagccataaccaggtcccgcctcctccttgcctaagacattatcaggaagctcagacttgcaagacccaggtttgtctgctctgtacaccctaccagcacgatgcctatgacactgggttactgggacatccgtggggtgagtgagagcctcttctgctgggtgggacatgtgtggggtgaggagtagctaggatgtgatttccaggagacagattgagtgctgaagttgttggaaagttttgcctctcagggcaagttcaaacacaggggggcttgtgcttatgtggcctgtgtgtgagcttgtgtcgtgactgttcagtgtaaggtgtaggctcaccaagagattgcacagtcagactgtcaggcttttccaatctgtgacttgtgatatgtcatcttcccagctggctcacgccattcgcctgttcctggagtatacagacacaagctatgaggacaagaagtacagcatgggggatggtgattacacctgcttctcagacccctgctcccctgaccctggtgctcagcaactctgctctgaccccctgttgctcagctctacacagctcctggagttgggtttagaaactgtcccttctagaaaccttgaattttggagggctgacttttgaaaatcttagtgatatacagaagcattctctgtccttggggtgtgtgaagtaggtgaaattgcagatcttggggtgttctcatgactcactccttggagggatccctagagaaggaagctgggatactggggtgatttcttttgacatcctcttgtccaccacagctcccgactatgacagaagccagtggctgagtgagaagttcaaactgggcctggacttccccaatgtaggtggagggaaggggaggtgtggggaaggcctagtgctctcacctcatctcctggcctggctgaggggttggcatcagtgtttctgcttgcctgtttcatccctgctggctgcacagtgtttctgtgttgggctgtgtcctggctctcccactcagtcgacaccgtgctcatggagggtttcctggggcagcacactgagtgccagggccatgtctatcctcacccagggaagggattcagctaccccataacccatctgaccatccctgattgtctatccagctgccctacttaattgatgggtcacacaagatcacccagagcaatgccatcctgcgctaccttggccggaagcacaacctttgtgagtggggctgactgcagggtggggacagaagccatccctcttggcttggctggagcaggatgctgagagtgggtctgtgttgtgtgtgctgcaggtggggagacagaggaggagaggattcgtgtggacgttttggagaaccaggctatggacacccgcctacagttggccatggtctgctacagccctgactttgtgagttccaccagccctgagttgaagctggccctgcactcttgctcttgtatcagctctagccccgtttgccaccacagcctctcagtgctactcatggtacagtgtttgaaattgccgacagagtaacccccaagctcagtttgccaaatgaaaacttctagtcatttgctctaagatcgtatccagactctccacagcgacatttagtccctgctaggacagacagagtgtgatccctccagttctagctgctggttctgtcctgagctgtgtctttctgttgccctggggtcttgccatgtctgcagccctcatactcacactatgagaagacactggggctagggaacacttcctcccaaatggcttcccagagctgtgtccttgacacccacagagagaagcagatgctcccaataggcaactcagtcagtcaaaggccttggatcctcggctcctgtttcattttgtcctctcaaattcccctcatttctttggaacctgtactgaagtcctcactgccccagtaggcagaacactacctgtttcctgggccgtttcagttgtttgcttctgcctcatgtgaggtcagagttcagagtcaggtgcctacaactgtctcatgcaaggtggttctgataatgatggtggagtccagggaacagagctgtatcttgttgggctgtttccaaagaacagtctaatcatggtgttgctctaactaaacacgtgggcctcaacccagactgaatctcacgaaggtgactgcttctctgcacgctggggcctgtacagccctgtgaggccagcctctgccagggagcctgtgtctgaaggtagtgatggttgttctctgcttcaggagagaaagaagccagagtacttagagggtctccctgagaagatgaagctttactccgaattcctgggcaagcagccatggtttgcagggaacaaggtaaaggcagcgggtggggagaaggatttgccatttcttcccaggtgtcaaattctagcactcacccttggcttcctgcagattacgtatgtggattttcttgtttacgatgtccttgatcaacaccgtatatttgaacccaagtgcctggacgccttcccaaacctgaaggacttcgtggctcggtttgaggtgatgtcctgaccccgcttcctcttgacctacttcccttccccccttccagaatgcctttctactccttgaaatggagatgaaaatggctagcttctgttgagcatagaactgtgttctgctctttcgtcccttgcatggagtttcccagcacaccctgcatgttgtgtaggattatcagctccttaggatcattttggaagcggattgtaaagactcagttcctcagggagtcagtaccattggaaggggacgtggtttttttccagtgtgcttctagcttccaagaacagggggcaatagatctaccggataccaaaggaaaaaagccataggttgcaatagagcctggattttccagccctgaagcctatggaaattcaggacatgcccggaatgtatagggagcactattcaggattgatgcacagtaccaagatacagtatccatatctggcctatacaattctttgctcagtcagacccctgagtggggaagcactgggacccagggctacagttagtgtgagtagacagctcactgctgttggaggattttatcctccaacatcctgtttctttcctttccttttcctccttggtgacatcttgatgtttgactgtagaatcattacagtgagactgtactgccatcgtcatcttctctagtgtggcctccgtgtggcacagttctgagctcagtacgatgtggaaacctgcgtctctgtccaggcatgcagagtggcaggcacgcctgactatgatgtacatgtgatccccacaagccccactttattagagatttgggggatcgaggccatagtccaatgggaatcttagcgtggggtcttctcctctgtccctgctgcacacgtgatgcgtttttccttagttttcattggcttgccttctggtccagcctgctcggctctggagattgtgtgagaactgttgaacagtgtggtgggagagtgtgggaggctgcagtccaaggccagccaagcctggcttcttgggtaaggctgccctggaactttgaattcatcacagtttatctgggcaccgtactggaaagatagcacacagcacagtgccattctgtagaatgttctctagcagggctgagtctaggcaggatggacacactaagtatgcatttagctcccagtgttctgagtgtagatttttctgcatcaggagaatggccaaggccactccattggccttgctgtgtcacctatccctctgctcattcagtcaggatttcctgaggtactgggtgagatctttgctctcttccaaagtacactggcatgttactggtccctttgacctgtttggtcctttcccaatgtggaaacgcagggcaagaaggagcctgcaggtaaaaaagaaaagaaaagaaagcgagaattgcgtaaccgggtagcaacaaggtagcttagggagtgaaccgagggaatcagaatggaggctgctgagcccctccctgtgtagaccgggatgcagactctcgctgttcctgctgagcctgtgtgcctggcttcctcctggcaggagcacagcactgttttgcgggattctgtggagagctccctcttcttctatacctgcaccacagctgcagatggacgcagctgaacgcagtgccagtttcccctacatcagaggacattaaagcatccccttaccagagttgtgcccctgagcaacccgggctgtgttggggttcttagagatgtcccagatcctcaattctcgctttctcctcctcctcccttcagggcctgaagaagatatctgactacatgaagagcggccgcttcctctccaagccaatctttgcaaagatggccttttggaacccaaagtagcaccacaaagtccagacctggggatactcatgagtgccctgctggctgtgggcctagagcatggctctggcgcccaccacatgcagctttctcctcctttccattccctgttcctccatctcctcttcccagcccttgcctcagtcaagcctcagttccctggtctctccatttcttcattagtcccctcccttgtctctgccctgcatccaacccttccctcactgattttcggaggactgtaccagacccctgaatccccagcctggcctgagagattagatctcactgtgctgccctggtccccaggaaggacccatttgatttgcaataaagtgtgaaccacatttgtccagtgtcctgttttgctgtctgtgacactcagggctgactgtgttgacttggttgattttgttttgttgctcgcaggaggagctagagggatggactctgggctatttga

SEQ ID NO: 12614 - protein, 217 aa, Rattus norvegicus
  ref <308>: DATABASE ACCESSION NUMBER: SWISS-Prot / AAA41296
  ref <309>: DATABASE ENTRY DATE: 2001-10-16
PMTLGYWDIRGLAHAIRLFLEYTDTSYEDKKYSMGDAPDYDRSQWLSEKFKLGLDFPNLPYLIDGSHKITQSNAILRYLGRKHNLCGETEEERIRVDVLENQAMDTRLQLAMVCYSPDFERKKPEYLEGLPEKMKLYSEFLGKQPWFAGNKITYVDFLVYDVLDQHRIFEPKCLDAFPNLKDFVARFEGLKKISDYMKSGRFLSKPIFAKMAFWNPK

SEQ ID NO: 12615 - DNA, 1139 bp, Homo sapiens
  ref <308>: DATABASE ACCESSION NUMBER: Refseq / XM_002155
  ref <309>: DATABASE ENTRY DATE: 2002-08-01
ggcctgtctgcggaatccgcaccaaccagcaccatgcccatgatactggggtactgggacatccgcgggctggcccacgccatccgcctgctcctggaatacacagactcaagctatgaggaaaagaagtacacgatgggggacgctcctgattatgacagaagccagtggctgaatgaaaaattcaagctgggcctggactttcccaatctgccctacttgattgatggggctcacaagatcacccagagcaacgccatcttgtgctacattgcccgcaagcacaacctgtgtggggagacagaagaggagaagattcgtgtggacattttggagaaccagaccatggacaaccatatgcagctgggcatgatctgctacaatccagaatttgagaaactgaagccaaagtacttggaggaactccctgaaaagctaaagctctactcagagtttctggggaagcggccatggtttgcaggaaacaagatcacttttgtagattttctcgtctatgatgtccttgacctccaccgtatatttgagcccaagtgcttggacgccttcccaaatctgaaggacttcatctcccgctttgagggcttggagaagatctctgcctacatgaagtccagccgcttcctcccaagacctgtgttctcaaagatggctgtctggggcaacaagtagggccttgaaggccaggaggtgggagtgaggagcccatactcagcctgctgcccaggctgtgcagcgcagctggactctgcatcccagcacctgcctcctcgttcctttctcctgtttattcccatctttactcccaagacttcattgtccctcttcactccccctaaacccctgtcccatgcaggccctttgaagcctcagctacccactatccttcgtgaacatcccctcccatcattacccttccctgcactaaagccagcctgaccttccttcctgttagtggttgtgtctgctttaaagggcctgcctggcccctcgcctgtggagctcagccccgagctgtccccgtgttgcatgaaggagcagcattgactggtttacaggccctgctcctgcagcatggtccctgccttaggcctacctgatggaagtaaagcctcaaccac

SEQ ID NO: 12616 - protein, 218 aa, Homo sapiens
  ref <308>: DATABASE ACCESSION NUMBER: Refseq / XP_002155
  ref <309>: DATABASE ENTRY DATE: 2002-08-01
MPMILGYWDIRGLAHAIRLLLEYTDSSYEEKKYTMGDAPDYDRSQWLNEKFKLGLDFPNLPYLIDGAHKITQSNAILCYIARKHNLCGETEEEKIRVDILENQTMDNHMQLGMICYNPEFEKLKPKYLEELPEKLKLYSEFLGKRPWFAGNKITFVDFLVYDVLDLHRIFEPKCLDAFPNLKDFISRFEGLEKISAYMKSSRFLPRPVFSKMAVWGNK

SEQ ID NO: 12617 - DNA, 4835 bp, Rattus norvegicus
  ref <308>: DATABASE ACCESSION NUMBER: EMBL / J04591
  ref <309>: DATABASE ENTRY DATE: 2000-03-04
gagcagaggcgcaggacgtccgtctccgcgcgcgtgacttctgcctgcgctcaagcttcagagttcagtttcaaggagccgcccaaccatgaagacaccgtggaaggttcttctgggactgcttggtgtcgctgcgcttgtcaccatcatcaccgtgccagtggttctgctgaacaaagatgaagcggccgctgatagcgcgagaacttacacactagctgactatttaaagaatacctttcgggtcaagtcctactccttgcggtgggtttcagattctgaatacctctacaagcaagaaaacaatatcttgctattcaatgctgaacacgggaacagctccattttcttggagaacagtacctttgagatctttggagattctataagtgattattcagtgtcacccgacagactgttcgttctcttagaatacaattatgtgaagcaatggagacactcctacacggcttcatacagtatttatgacttgaataaaagacagctgatcacagaagagaagattccaaataatacacagtggatcacatggtcacaagaaggtcacaaattggcatatgtctggaagaatgatatttatgttaaaattgaaccacatttgcctagtcataggatcacatcaacaggaaaagaaaatgtaatatttaacggaataaatgactgggtttatgaagaggaaatcttcggtgcctactccgcactgtggtggtctccaaacggcacttttctagcttatgcccagtttaacgacaccggagtgcctctcattgaatactccttctactctgatgagtcactgcagtaccccaagacagtctggattccgtacccaaaggcaggagctgtgaatccaactgtaaagttctttattgtaaatacagactctctcagctcaactactactacgattcccatgcaaatcaccgctcctgcatctgtgacaacaggggatcactacttgtgtgacgtggcctgggtttcagaagacagaatctcgttgcagtggctcaggaggattcagaactattccgtgatggcgatctgcgactatgataagaccaccctagtatggaactgtccaacgacgcaggagcatattgaaacgagtgccacaggctggtgcggaagatttaggcctgcagaaccccacttcacctccgacggaagcagcttctataaaatcgtcagtgacaaagatggctacaaacacatctgccagttccagaaagataggaaacccgaacaggtctgtacatttattacaaaaggagcctgggaagtcattagtatcgaagctctgaccagcgattatctgtactacattagtaatgaatataaagaaatgccaggaggaagaaatctttataaaattcagcttactgaccacacaaataagaagtgccttagttgtgacctgaatccagaaagatgccagtattactcggtgtcacttagtaaagaggcaaagtactatcagctgggatgccggggccctggtctgcccctctacactctgcatcgcagcactgatcaaaaagagctgagagtcctggaggacaattctgctttggataaaatgctgcaagatgtccaaatgccttcaaaaaaattggacttcattgttctgaatgaaacaagattttggtatcaaatgatcttacctcctcattttgataaatccaagaaataccctctactaatagatgtatatgcaggtccctgtagtcaaaaagcagatgctgccttcagactcaactgggccacttaccttgcaagcacagaaaacatcatagtagctagctttgatggcagaggaagtggttaccaaggagataagatcatgcatgcaatcaacaaaagacttggaacactggaagttgaagatcaaattgaagcagccaggcaatttttaaaaatgggatttgtggacagcaagcgagttgcaatttggggctggtcatatggagggtacgtaacctcaatggtcctgggatcgggaagtggcgtgttcaagtgtggaatagccgtggcgcccgtgtcacggtgggagtactatgactcagtatacacagagcgttacatgggtctcccaactccagaggacaaccttgaccattacaggaactcaacagtcatgagcagagctgaaaattttaagcaagttgagtacctccttattcacggtacagcagatgataatgttcactttcagcagtcagctcagatctccaaagccctggtggatgctggcgtggatttccaagcaatgtggtacacggacgaagaccatgggatcgccagcagcacagctcaccagcacatctattcccacatgagccatttcctccagcagtgcttctccttacgctagcatggcaaggctctccgcagcttactcaagagcacacttgtcctcattatctcaaaactgcactgttaagatgacgattttaataatgtcgcctcgagaaattccagcctacttcccagttttatacctgcaatcctaactaaggatgcctgtcttcagaacagattattaccttacagcaatttggatttccccctctgttttgtttatcatttaaaaccatttccacatcagctgctgaaacaacaaatataaattatttttgcaagagctatgcatagatttcctgagcagaatttcaatttttttcccccttactaggctggtccaaatcttgttcccttatttaagggggtggcaagacgtgggtaatgatgtcattaggccagcaacaagagaagcgggaacagagaatatggctagaaacccaggtccaagcatacaaacccaaccaggctactgtcagctcgcctcgagaagagctgctcactgccagactggcaccgttttctgagaaagactattcaaacagtctcaggaaatcatatatgcaaagcactgacttctaagtaaaaccacagcagttgaatagactccaaagaaatgcaagggacgctgccagcaatgtaagggccccaggtgccagttatggctataggtgctacataaacacagcaagcctgatgggaaagcatgttaaatgtgcttttaaaaattaccaagtctcctagtgagaagaggcagcttggaacatagcgacttgccccgttaaaagttgaaaatatttgtgtcacaaattctaacatgaaggaatacttgcgtcagttcttcctacttcctttctttgagcattttcattaaagcattttaacttcattatctttctaatggaaaactgtatgagaatgttttgtgttattatttctattctacacactggaatgttgcctggtcatttagcaagtatgcttccattttttcaaaggtaatgggttatatcttgaatcaaacttaaactgcattgacatatggacacatttgttcaaaggttcttgtttaacttgtgtgaaatccaagactgtcttgtaaacatggaaagagttcaacttttaaaaaaaaatttagatacataaaactgtttaaagttatatgattcataagagtttatctaatacccccagaaatttctactcacatttatcacatagcttggtcatttacatactatggaactcataatattatttaacttaggggagcacgtgaggttcgtggcacgagatggaatgctatcagcagagtagacatgtttttccagggtcttgttttttgtttttgtttctggtctcttcctgtttgggcggagggtaatataatagataatatacataatagaatacactctgatacctgacttagccgtgttttgacaacttggaaacttgattcaattatttataacacagctgaaaatttaaaatggactccacacatttaaatgcagtttcaggccaattttctaggtacaattaccacagacaggtgagctacagcataaattccaaacatggcagaaatggaaattacctataaatataaatgagtttagatattgatgagcctgatgctatttcccgggcactccactgttcccctcaccttaaggaactctcaagtcctgctcttccactgcaagcacagctggtccttaaatctacaggcctctggctacagtccgaatttgaacacagttctgtcaccgtgtgcagcagcagcagccatgtgcaaagttctagatcaaggaacaaaggtagcacatgttcctgacagtgtggaaacataaacataaatgcgaattaaatagaaattatcccttctgaattctttttgttcctttcatttctaaataggttgttcctggagcctgaattaataaaaagaacacagcacacatttttcaggcgatgagggtttcacatggtgataatgtgaatacattcagtttttatttgattctcataggtcaagttttactgttcggtaagagttgtaaattagattaaaaccctgatgcataagttgtaaacaaacttaatttaagagcaagtttgaaaagcacaagagctaataacaccactgaggcatatagacaagtctcttatgggcatatgcagctccctgaagcgcatggatcaagctaccgcctcagagcacaccagcaccaggggcgcatgctaaaggaagagctcccctccccaccccccatgcttcacgatccatgttgacttcagtctgtgccattctgggcatcatagttctccttcagattattagcagttccacctcttggcacgtactacttttgctctaagttggagtgagagtactggtttataagattactggatttgtacaatatttaagattcaataaattctaagtg

SEQ ID NO: 12618 - protein, 767 aa, Rattus norvegicus
  ref <308>: DATABASE ACCESSION NUMBER: SWISS-Prot / AAA41096
  ref <309>: DATABASE ENTRY DATE: 2002-06-15
MKTPWKVLLGLLGVAALVTIITVPVVLLNKDEAAADSARTYTLADYLKNTFRVKSYSLRWVSDSEYLYKQENNILLFNAEHGNSSIFLENSTFEIFGDSISDYSVSPDRLFVLLEYNYVKQWRHSYTASYSIYDLNKRQLITEEKIPNNTQWITWSQEGHKLAYVWKNDIYVKIEPHLPSHRITSTGKENVIFNGINDWVYEEEIFGAYSALWWSPNGTFLAYAQFNDTGVPLIEYSFYSDESLQYPKTVWIPYPKAGAVNPTVKFFIVNTDSLSSTTTTIPMQITAPASVTTGDHYLCDVAWVSEDRISLQWLRRIQNYSVMAICDYDKTTLVWNCPTTQEHIETSATGWCGRFRPAEPHFTSDGSSFYKIVSDKDGYKHICQFQKDRKPEQVCTFITKGAWEVISIEALTSDYLYYISNEYKEMPGGRNLYKIQLTDHTNKKCLSCDLNPERCQYYSVSLSKEAKYYQLGCRGPGLPLYTLHRSTDQKELRVLEDNSALDKMLQDVQMPSKKLDFIVLNETRFWYQMILPPHFDKSKKYPLLIDVYAGPCSQKADAAFRLNWATYLASTENIIVASFDGRGSGYQGDKIMHAINKRLGTLEVEDQIEAARQFLKMGFVDSKRVAIWGWSYGGYVTSMVLGSGSGVFKCGIAVAPVSRWEYYDSVYTERYMGLPTPEDNLDHYRNSTVMSRAENFKQVEYLLIHGTADDNVHFQQSAQISKALVDAGVDFQAMWYTDEDHGIASSTAHQHIYSHMSHFLQQCFSLR

SEQ ID NO: 12619 - DNA, 2375 bp, Homo sapiens
  ref <308>: DATABASE ACCESSION NUMBER: EMBL / M80536
  ref <309>: DATABASE ENTRY DATE: 2000-03-04
atgaagacaccgtggagggttctcctgggactgctgggtgctgctgcgcttgtcaccatcatcaccgtgcccgtggttctgctgaacaaaggcacagatgatgctacagctgacagtcgcaaaacttacactctaactgattacttaaaaaatacttatagactgaagttatactccttaagatggatttcagatcatgaatatctctacaaacaagaaaataatatcttggtattcaatgctgaatatggaaacagctcagttttcttggagaacagtacatttgatgagtttggacattctatcaatgattattcaatatctcctgatgggcagtttattctcttagaatacaactacgtgaagcaatggaggcattcctacacagcttcatatgacatttatgatttaaataaaaggcagctgattacagaagagaggattccaaacaacacacagtgggtcacatggtcaccagtgggtcataaattggcatatgtttggaacaatgacatttatgttaaaattgaaccaaatttaccaagttacagaatcacatggacggggaaagaagatataatatataatggaataactgactgggtttatgaagaggaagtcttcagtgcctactctgctctgtggtggtctccaaacggcacttttttagcatatgcccaatttaacgacacagaagtcccacttattgaatactccttctactctgatgagtcactgcagtacccaaagactgtacgggttccatatccaaaggcaggagctgtgaatccaactgtaaagttctttgttgtaaatacagactctctcagctcagtcaccaatgcaacttccatacaaatcactgctcctgcttctatgttgataggggatcactacttgtgtgatgtgacatgggcaacacaagaaagaatttctttgcagtggctcaggaggattcagaactattcggtcatggatatttgtgactatgatgaatccagtggaagatggaactgcttagtggcacggcaacacattgaaatgagtactactggctgggttggaagatttaggccttcagaacctcattttacccttgatggtaatagcttctacaagatcatcagcaatgaagaaggttacagacacatttgctatttccaaatagataaaaaagactgcacatttattacaaaaggcacctgggaagtcatcgggatagaagctctaaccagtgattatctatactacattagtaatgaatataaaggaatgccaggaggaaggaatctttataaaatccaacttagtgactatacaaaagtgacatgcctcagttgtgagctgaatccggaaaggtgtcagtactattctgtgtcattcagtaaagaggcgaagtattatcagctgagatgttccggtcctggtctgcccctctatactctacacagcagcgtgaatgataaagggctgagagtcctggaagacaattcagctttggataaaatgctgcagaatgtccagatgccctccaaaaaattggacttcattattttgaatgaaacaaaattttggtatcagatgatcttgcctcctcattttgataaatccaagaaatatcctctactattagatgtgtatgcaggcccatgtagtcaaaaagcagacattgtcttcagactgaactgggccacttaccttgcaagcacagaaaacattatagtagctagctttgatggcagaggaagtggttaccaaggagataagatcatgcatgcaatcaacagaagactgggaacatttgaagttgaagatcaaattgaagcagccagacaattttcaaaaatgggatttgtggacaacaaacgaattgcaatttggggctggtcatatggagggtacgtaacctcaatggtcctgggatcgggaagtggcgtgttcaagtgtggaatagccgtggcgcctgtatcccggtgggagtactatgagtcagtgtacacagaacgttacatgggtctcccaactccagaagacaaccttgaccattacagaaattcaacagtcatgagcagagctgaaaattttaaacaagttgagtacctccttattcatggaacagcagatgataacgttcactttcagcagtcagctcagatctccaaagccctggtcgatgttggagtggatttccaggcaatgtggtatactgatgaagaccatggaatagctagcagcacagcacaccaacatatatatacccacatgagccacttcataaaacaatgtttctctttaccttagcacctcaaaatactatgccatttaaagcttattaaaactcatttttgttttcattatctcaaaaaaaaaaaaaa

SEQ ID NO: 12620 - protein, 766 aa, Homo sapiens
  ref <308>: DATABASE ACCESSION NUMBER: SWISS-Prot / AAA52308
  ref <309>: DATABASE ENTRY DATE: 2002-06-15
MKTPWKVLLGLLGAAALVTIITVPVVLLNKGTDDATADSRKTYTLTDYLKNTYRLKLYSLRWISDHEYLYKQENNILVFNAEYGNSSVFLENSTFDEFGHSINDYSISPDGQFILLEYNYVKQWRHSYTASYDIYDLNKRQLITEERIPNNTQWVTWSPVGHKLAYVWNNDIYVKIEPNLPSYRITWTGKEDIIYNGITDWVYEEEVFSAYSALWWSPNGTFLAYAQFNDTEVPLIEYSFYSDESLQYPKTVRVPYPKAGAVNPTVKFFVVNTDSLSSVTNATSIQITAPASMLIGDHYLCDVTWATQERISLQWLRRIQNYSVMDICDYDESSGRWNCLVARQHIEMSTTGWVGRFRPSEPHFTLDGNSFYKIISNEEGYRHICYFQIDKKDCTFITKGTWEVIGIEALTSDYLYYISNEYKGMPGGRNLYKIQLSDYTKVTCLSCELNPERCQYYSVSFSKEAKYYQLRCSGPGLPLYTLHSSVNDKGLRVLEDNSALDKMLQNVQMPSKKLDFIILNETKFWYQMILPPHFDKSKKYPLLLDVYAGPCSQKADTVFRLNWATYLASTENIIVASFDGRGSGYQGDKIMHAINRRLGTFEVEDQIEAARQFSKMGFVDNKRIAIWGWSYGGYVTSMVLGSGSGVFKCGIAVAPVSRWEYYDSVYTERYMGLPTPEDNLDHYRNSTVMSRAENFKQVEYLLIHGTADDNVHFQQSAQISKALVDVGVDFQAMWYTDEDHGIASSTAHQHIYTHMSHFIKQCFSLP

SEQ ID NO: 12621 - DNA, 431 bp, Rattus norvegicus; identical to SEQ ID NO: 2561
  ref <308>: DATABASE ACCESSION NUMBER: EMBL / J04807
  ref <309>: DATABASE ENTRY DATE: 2000-03-04

SEQ ID NO: 12622 - protein, 110 aa, Rattus norvegicus; identical to SEQ ID NO: 2562
  ref <308>: DATABASE ACCESSION NUMBER: Refseq / NP_062003
  ref <309>: DATABASE ENTRY DATE: 2002-11-14

SEQ ID NO: 12623 - DNA, 450 bp, Homo sapiens; identical to SEQ ID NO: 2563
  ref <308>: DATABASE ACCESSION NUMBER: Refseq / NM_000207
  ref <309>: DATABASE ENTRY DATE: 2000-10-31

SEQ ID NO: 12624 - protein, 110 aa, Homo sapiens; identical to SEQ ID NO: 2564
  ref <308>: DATABASE ACCESSION NUMBER: Refseq / NP_000198
  ref <309>: DATABASE ENTRY DATE: 2000-10-31

SEQ ID NO: 12625 - DNA, 593 bp, Rattus norvegicus; identical to SEQ ID NO: 2708
  ref <308>: DATABASE ACCESSION NUMBER: EMBL / K03045
  ref <309>: DATABASE ENTRY DATE: 2000-03-04

SEQ ID NO: 12626 - protein, 201 aa, Rattus norvegicus; identical to SEQ ID NO: 2709
  ref <308>: DATABASE ACCESSION NUMBER: SWISS-Prot / AAB06955
  ref <309>: DATABASE ENTRY DATE: 2000-05-30

SEQ ID NO: 12627 - DNA, 919 bp, Homo sapiens; identical to SEQ ID NO: 2710
  ref <308>: DATABASE ACCESSION NUMBER: Refseq / NM_006744
  ref <309>: DATABASE ENTRY DATE: 2001-12-20

SEQ ID NO: 12628 - protein, 199 aa, Homo sapiens
  ref <308>: DATABASE ACCESSION NUMBER: Refseq / NP_006735
  ref <309>: DATABASE ENTRY DATE: 2001-12-20
MKWVWALLLLAAWAAAERDCRVSSFRVKENFDKARFSGTWYAMAKKDPEGLFLQDNIVAEFSVDETGQMSATAKGRVRLLNNWDVCADMVGTFTDTEDPAKFKMKYWGVASFLQKGNDDHWIVDTDYDTYAVQYSCRLLNLDGTCADSYSFVFSRDPNGLPPEAQKIVRQRQEELCLARQYRLIVHNGYCDGRSERNLL

SEQ ID NO: 12629 - DNA, 593 bp, Rattus norvegicus; identical to SEQ ID NO: 2708
  ref <308>: DATABASE ACCESSION NUMBER: EMBL / K03045
  ref <309>: DATABASE ENTRY DATE: 2000-03-04

SEQ ID NO: 12630 - protein, 201 aa, Rattus norvegicus; identical to SEQ ID NO: 2709
  ref <308>: DATABASE ACCESSION NUMBER: SWISS-Prot / AAB06955
  ref <309>: DATABASE ENTRY DATE: 2000-05-30

SEQ ID NO: 12631 - DNA, 919 bp, Homo sapiens; identical to SEQ ID NO: 2710
  ref <308>: DATABASE ACCESSION NUMBER: Refseq / NM_006744
  ref <309>: DATABASE ENTRY DATE: 2001-12-20

SEQ ID NO: 12632 - protein, 199 aa, Homo sapiens; identical to SEQ ID NO: 12628
  ref <308>: DATABASE ACCESSION NUMBER: Refseq / NP_006735
  ref <309>: DATABASE ENTRY DATE: 2001-12-20

SEQ ID NO: 12633 - DNA, 321 bp, Rattus norvegicus
  ref <308>: DATABASE ACCESSION NUMBER: EMBL / L00088
  ref <309>: DATABASE ENTRY DATE: 1997-11-30
tgtccaacagcttttgtgaaacacatcatgtctgtctaaaacgagaattcaagaacacagtgttggggaagactggccagaaagtcagttcaagaacacctatggctaactgtcaacaccagcttgccaccacccggaagaacaaacaatctagaccattctagattgaaggattccctgaagttttatcaaccttgagtttttcatggcacacacatcaggttgataatctcaagtccatgtaccacctttatgatctacttgggtccacaacattcataagagcactacatcaataaacttggtcagtctggaagactc

SEQ ID NO: 12634 - protein, 188 aa, Rattus norvegicus; identical to SEQ ID NO: 2702
  ref <308>: DATABASE ACCESSION NUMBER: SWISS-Prot / AAA98533
  ref <309>: DATABASE ENTRY DATE: 2002-06-15

SEQ ID NO: 12635 - DNA, 1045 bp, Homo sapiens; identical to SEQ ID NO: 2703

SEQ ID NO: 12636 - protein, 194 aa, Homo sapiens; identical to SEQ ID NO: 2704

SEQ ID NO: 12637 - DNA, 2935 bp, Rattus norvegicus
  ref <308>: DATABASE ACCESSION NUMBER: EMBL / L01702
  ref <309>: DATABASE ENTRY DATE: 2000-03-04
ctaggtcagcatggattcctggttcattcttatcctgtttggcagtggtctaatacacattagtgccaacaacactactacagtttcaccttctttaggaactacaagattaattaaaacatcaacaacagaatcggctaaggaagagaataaaacttcaaattcaacctcttcagtaatttctctttctgtgacaccaacattcagcccaaatctaactctggaacccacctatgtgactactgttaattcttcacactctgacaatgggaccaagagagcagccagcacggaatctggaggcactaccatttcaccaaacggaacatacggaacatggcttactgataaccagttcacggatgccagaacagaaccctgggaggggaattccagcagtgcagcaaccactccagaaaccttcccccctgcagatgagacaccaatcattgcggtgatggtggccctgtcctctctgctagtaattctctttattattatagttctgtacatgttaaggtttaagaaatacaagcaagctgggagccattccaattctttccgcctgtcaaatggccgcacagaggatgtggagccccaaagtgtaccacttctggccaggtccccgagcaccaacagaaagtacccaccactgcctgtggacaagctggaagaggagattaaccggagaatggctgatgacaataagctcttcagagaggaattcaacgccctccctgcctgtccaatccaggccacctgtgaggctgcctccaaggaagaaaacaaggaaaaaaaccgatatgtaaacctcctgccttatgaccactccagagtgcacctgacacctgttgaaggggttccagattctgattacatcaacgcctcattcattaatggctaccaggaaaagaacaaattcattgctgcacaaggaccaaaagaagaaacggtgaatgatttctggagaatgatatgggaacagaacacagccaccattgtcatggtgaccaacctgaaggagagaaaggagtgtaaatgtgcccagtattggccagaccaaggctgctggccatatgggaatgtccgtgtgtctgtcgaggatgtgactgttctggtggactacacagtacggaaattctgcatccagcaggtgggcgacgtcaccaacaggaagccacagcgcctcatcactcagttccatttcaccagctggccagactttggggtgccttttaccccaattggcatgctcaagttcctcaagaaggtgaaagcctgtaaccctcagtatgcaggggctatcgtggtccactgcagtgcaggtgtagggcgcactggcacctttgttgtcatcgatgccatgctggacatgatgcattcggagcgcaaagtggatgtatatgggtttgtgagccggatccgggcccagcgctgccagatggtccagacagacatgcagtacgtcttcatataccaggcccttctggagcattatctatatggcgacacagagctggaagtgacttccctagacacccacctgcaaaaaatttataacaagatcccaggaactagcaacaatggactagaggaggaatttaagaaattaacttcaatcaaaatccaaaatgacaagatgcgtactggttaccttccagccaacatgaagaagaaccgagttttacagatcattccatatgaatttaacagagtgatcattccagtcaaacggggcgaagagaacacagactatgtgaacgcatccttcattgatccgtaccggcagaaagattcctacatcgccagccagggccctcttctccacacaactgaggacttctggcgaatgatctgggaatggaagtcctgctccattgtaatgctaacagaactggaagaaagaggccaggagaagtgtgcccagtactggccatctgatggcctggtgtcctatggagacatcacagttgagctgaagaaggaggaggaatgtgagagctacactgtccgagacctcctggtcaccaacaccagggagaacaagagtcggcagatccggcagttccacttccacggctggcctgaggtgggcatccccagcgatgggaagggtatgatcaacatcatcgcagcagtgcagaagcagcagcagcagtcagggaaccatcccatcactgtgcactgcagtgccggggcaggacggacagggaccttttgtgccttgagcacagtcctggagtgcgtgaaagcagaaggaattttggatgtcttccaaactgtcaagacgctgcggctgcagaggccacacatggtccagatactggaacagtatgaattctgctacaaggtggtacaggagtacatcgatgccttctcagattatgccaacttcaagtgacaggggagaaggcccacagacaggagaattgcctttaatattttgtaatatctgtttttgttaatatacccaaaattgtatatatcttataactgttttggaaatggcacataggcttctattacctattaggtggagattttgtatgtaaatgtgttagcactatagtccttttccagtgttttattggggaattaaatagtgcgatatttgagttgatttaatgaagtccttagcctggaaattgggccagattattctttgcttcaaatgtctttttctaaagaagacaaacataagagtcattccaggtaactcggtgccaactaaaacaaagcacaaagttctcggagctcttgaggaaatggttgtctcacgtccccaggccggcctcttcccttccctgtccctctccagtgcaccctcatctcccaccaatatcagccacctcaggagtggggaataatgagaccagagcagcatccctggcaccacactaggaatcatcaggtaataaacactcttgattcccgg

SEQ ID NO: 12638 - protein, 796 aa, Rattus norvegicus
  ref <308>: DATABASE ACCESSION NUMBER: SWISS-Prot / AAA41983
  ref <309>: DATABASE ENTRY DATE: 2002-06-15
MDSWFILILFGSGLIHISANNTTTVSPSLGTTRLIKTSTTESAKEENKTSNSTSSVISLSVTPTFSPNLTLEPTYVTTVNSSHSDNGTKRAASTESGGTTISPNGTYGTWLTDNQFTDARTEPWEGNSSSAATTPETFPPADETPIIAVMVALSSLLVILFIIIVLYMLRFKKYKQAGSHSNSFRLSNGRTEDVEPQSVPLLARSPSTNRKYPPLPVDKLEEEINRRMADDNKLFREEFNALPACPIQATCEAASKEENKEKNRYVNLLPYDHSRVHLTPVEGVPDSDYINASFINGYQEKNKFIAAQGPKEETVNDFWRMIWEQNTATIVMVTNLKERKECKCAQYWPDQGCWPYGNVRVSVEDVTVLVDYTVRKFCIQQVGDVTNRKPQRLITQFHFTSWPDFGVPFTPIGMLKFLKKVKACNPQYAGAIVVHCSAGVGRTGTFVVIDAMLDMMHSERKVDVYGFVSRIRAQRCQMVQTDMQYVFIYQALLEHYLYGDTELEVTSLDTHLQKIYNKIPGTSNNGLEEEFKKLTSIKIQNDKMRTGYLPANMKKNRVLQIIPYEFNRVIIPVKRGEENTDYVNASFIDPYRQKDSYIASQGPLLHTTEDFWRMIWEWKSCSIVMLTELEERGQEKCAQYWPSDGLVSYGDITVELKKEEECESYTVRDLLVTNTRENKSRQIRQFHFHGWPEVGIPSDGKGMINIIAAVQKQQQQSGNHPITVHCSAGAGRTGTFCALSTVLECVKAEGILDVFQTVKTLRLQRPHMVQILEQYEFCYKVVQEYIDAFSDYANFK

SEQ ID NO: 12639 - DNA, 2565 bp, Homo sapiens
  ref <308>: DATABASE ACCESSION NUMBER: EMBL / X53364
  ref <309>: DATABASE ENTRY DATE: 1991-10-25
aattccgtggtaatggatgatgcagttcaaataactaaggacacatgttcaaagagcataattaactttttaaaagaagctagacttcttcagaagcttgccagtttttcaagctgatttctctcactggcaactcttcagagtgctgttcctactccaccctcccctggtgataagcatggattcctggttcattcttgttctgctcggcagtggtctgatatgtgtcagtgccaacaatgctaccacagttgcaccttctgtaggaatcacaagattaattaactcatcaacggcagaaccagttaaagaagaggccaaaacttcaaatccaacttcttcactaacttctctttctgtggcaccaacattcagcccaaatataactctgggacccacctatttaaccactgtcaattcttcagactctgacaatgggaccacaagaacagcaagcaccaattctataggcattacaatttcaccaaatggaacgtggcttccagataaccagttcacggatgccagaacagaaccctggccggggaattccagcaccgcagcaaccactccagaaactttccctccttcagatgagacaccaattattgcggtgatggtggccctgtcctctctgctagtgatcgtgtttattatcatagttttgtacatgttaaggtttaagaaatacaagcaagctgggagccattccaattctttccgcttatccaacggccgcactgaggatgtggagccccagagtgtgccacttctggccagatccccaagcaccaacaggaaatacccacccctgcccgtggacaagctggaagaggaaattaaccggagaatggcagacgacaataagctcttcagggaggaattcaacgctctccctgcatgtcctatccaggccacctgtgaggctgcttccaaggaggaaaacaaggaaaaaaatcgatatgtaaacatcttgccttatgaccactctagagtccacctgacaccggttgaaggggttccagattctgattacatcaatgcttcattcatcaacggttaccaagaaaagaacaaattcattgctgcacaaggaccaaaagaagaaacggtgaatgatttctggcggatgatctgggaacaaaacacagccaccatcgtcatggttaccaacctgaaggagagaaaggagtgcaagtgcgcccagtactggccagaccaaggctgctggacctatgggaatattcgggtgtctgtagaggatgtgactgtcctggtggactacacagtacggaagttctgcatccagcaggtgggcgacatgaccaacagaaagccacagcgcctcatcactcagttccactttaccagctggccagactttggggtgccttttaccccgatcggcatgctcaagttcctcaagaaggtgaaggcctgtaaccctcagtatgcaggggccatcgtggtccactgcagtgcaggtgtagggcgtacaggtacctttgtcgtcattgatgccatgctggacatgatgcatacagaacggaaggtggacgtgtatggctttgtgagccggatccgggcacagcgctgccagatggtgcaaaccgatatgcagtatgtcttcatataccaagcccttctggagcattatctctatggagatacagaactggaagtgacctctctagaaacccacctgcagaaaatttacaacaaaatcccagggaccagcaacaatggattagaggaggagtttaagaagttaacatcaatcaaaatccagaatgacaagatgcggactggaaaccttccagccaacatgaagaagaaccgtgttttacagatcattccatatgaattcaacagagtgatcattccagttaagcggggcgaagagaatacagactatgtgaacgcatcctttattgatggctaccggcagaaggactcctatatcgccagccagggccctcttctccacacaattgaggacttctggcgaatgatctgggagtggaaatcctgctctatcgtgatgctaacagaactggaggagagaggccaggagaagtgtgcccagtactggccatctgatggactggtgtcctatggagatattacagtggaactgaagaaggaggaggaatgtgagagctacaccgtccgagacctcctggtcaccaacaccagggagaataagagccggcagatccggcagttccacttccatggctggcctgaagtgggcatccccagtgacggaaagggcatgatcagcatcatcgccgccgtgcagaagcagcagcagcagtcagggaaccaccccatcaccgtgcactgcagcgccggggcaggaaggacggggaccttctgtgccctgagcaccgtcctggagcgtgtgaaagcagaggggattttggatgtcttccagactgtcaagagcctgcggctacagaggccacacatggtccagacactggaacagtatgagttctgctacaaggtggtgcaggagtatattgatgcattctcagattatgccaacttcaagtaagcggc

SEQ ID NO: 12640 - protein, 802 aa, Homo sapiens
  ref <308>: DATABASE ACCESSION NUMBER: SWISS-Prot / CAA37447
  ref <309>: DATABASE ENTRY DATE: 2002-06-15
MDSWFILVLLGSGLICVSANNATTVAPSVGITRLINSSTAEPVKEEAKTSNPTSSLTSLSVAPTFSPNITLGPTYLTTVNSSDSDNGTTRTASTNSIGITISPNGTWLPDNQFTDARTEPWEGNSSTAATTPETFPPSDETPIIAVMVALSSLLVIVFIIIVLYMLRFKKYKQAGSHSNSKQAGSHSNSFRLSNGRTEDVEPQSVPLLARSPSTNRKYPPLPVDKLEEEINRRMADDNKLFREEFNALPACPIQATCEAASKEENKEKNRYVNILPYDHSRVHLTPVEGVPDSDYINASFINGYQEKNKFIAAQGPKEETVNDFWRMIWEQNTATIVMVTNLKERKECKCAQYWPDQGCWTYGNIRVSVEDVTVLVDYTVRKFCIQQVGDMTNRKPQRLITQFHFTSWPDFGVPFTPIGMLKFLKKVKACNPQYAGAIVVHCSAGVGRTGTFVVIDAMLDMMHTERKVDVYGFVSRIRAQRCQMVQTDMQYVFIYQALLEHYLYGDTELEVTSLETHLQKIYNKIPGTSNNGLEEEFKKLTSIKIQNDKMRTGNLPANMKKNRVLQIIPYEFNRVIIPVKRGEENTDYVNASFIDGYRQKDSYIASQGPLLHTIEDFWRMIWEWKSCSIVMLTELEERGQEKCAQYWPSDGLVSYGDITVELKKEEECESYTVRDLLVTNTRENKSRQIRQFHFHGWPEVGIPSDGKGMISIIAAVQKQQQQSGNHPITVHCSAGAGRTGTFCALSTVLERVKAEGILDVFQTVKSLRLQRPHMVQTLEQYEFCYKVVQEYIDAFSDYANFK

SEQ ID NO: 12641 - DNA, 3617 bp, Rattus norvegicus; identical to SEQ ID NO: 2758
  ref <308>: DATABASE ACCESSION NUMBER: EMBL / L03294
  ref <309>: DATABASE ENTRY DATE: 2000-03-04

SEQ ID NO: 12642 - protein, 474 aa, Rattus norvegicus; identical to SEQ ID NO: 2759
  ref <308>: DATABASE ACCESSION NUMBER: SWISS-Prot / Q06000
  ref <309>: DATABASE ENTRY DATE: 2002-06-15

SEQ ID NO: 12643 - DNA, 3549 bp, Homo sapiens; identical to SEQ ID NO: 2760
  ref <308>: DATABASE ACCESSION NUMBER: EMBL / M15856
  ref <309>: DATABASE ENTRY DATE: 1999-07-02

SEQ ID NO: 12644 - protein, 475 aa, Homo sapiens; identical to SEQ ID NO: 2761
  ref <308>: DATABASE ACCESSION NUMBER: SWISS-Prot / LIHUL
  ref <309>: DATABASE ENTRY DATE: 2002-06-15

SEQ ID NO: 12645 - DNA, 3617 bp, Rattus norvegicus; identical to SEQ ID NO: 2758
  ref <308>: DATABASE ACCESSION NUMBER: EMBL / L03294
  ref <309>: DATABASE ENTRY DATE: 2000-03-04

SEQ ID NO: 12646 - protein, 474 aa, Rattus norvegicus; identical to SEQ ID NO: 2759
  ref <308>: DATABASE ACCESSION NUMBER: SWISS-Prot / Q06000
  ref <309>: DATABASE ENTRY DATE: 2002-06-15

SEQ ID NO: 12647 - DNA, 3549 bp, Homo sapiens; identical to SEQ ID NO: 2760
  ref <308>: DATABASE ACCESSION NUMBER: EMBL / M15856
  ref <309>: DATABASE ENTRY DATE: 1999-07-02

SEQ ID NO: 12648 - protein, 475 aa, Homo sapiens; identical to SEQ ID NO: 2761
  ref <308>: DATABASE ACCESSION NUMBER: SWISS-Prot / LIHUL
  ref <309>: DATABASE ENTRY DATE: 2002-06-15

SEQ ID NO: 12649 - DNA, 3617 bp, Rattus norvegicus; identical to SEQ ID NO: 2758
  ref <308>: DATABASE ACCESSION NUMBER: EMBL / L03294
  ref <309>: DATABASE ENTRY DATE: 2000-03-04

SEQ ID NO: 12650 - protein, 474 aa, Rattus norvegicus; identical to SEQ ID NO: 2759
  ref <308>: DATABASE ACCESSION NUMBER: SWISS-Prot / Q06000
  ref <309>: DATABASE ENTRY DATE: 2002-06-15

SEQ ID NO: 12651 - DNA, 3549 bp, Homo sapiens; identical to SEQ ID NO: 2760
  ref <308>: DATABASE ACCESSION NUMBER: EMBL / M15856
  ref <309>: DATABASE ENTRY DATE: 1999-07-02

SEQ ID NO: 12652 - protein, 475 aa, Homo sapiens; identical to SEQ ID NO: 2761
  ref <308>: DATABASE ACCESSION NUMBER: SWISS-Prot / LIHUL
  ref <309>: DATABASE ENTRY DATE: 2002-06-15

SEQ ID NO: 12653 - DNA, 2136 bp, Rattus norvegicus
  ref <308>: DATABASE ACCESSION NUMBER: EMBL / L04485
  ref <309>: DATABASE ENTRY DATE: 2000-02-01
gaattccgcggaattccgcccggctgcaagatgcccaagaagaagccgacgcccatccagctgaacccggcccccgatggctccgcggttaacgggaccagctcggccgagaccaacctggaggccttgcagaagaagctggaggagctggagctggacgagcagcagcggaagcgccttgaggcctttctgacgcagaagcagaaggtgggagagttgaaggatgatgactttgagaagatcagtgaactgggggctggcaatggtggagtggtgttcaaggtctcccacaagccatctggcctggttatggctaggaagctaattcacctggagatcaaacccgcaatccggaaccagatcatccgggagctgcaggtgctgcatgagtgcaactccccgtacatagtgggcttctacggggccttctacagtgacggcgagatcagcatctgcatggagcacatggatggtgggtccttggatcaagtgctgaagaaagctggaagaattcctgagcaaattttaggaaaagtcagcatcgctgtgataaaaggcctgacatatctacgagagaagcacaagattatgcacagagatgtcaagccttccaacattctagtgaactcacgtggggagatcaaactctgcgattttggggtcagcgggcagctaattgactccatggccaactccttcgtgggaacaaggtcctacatgtcgcctgagagactccaggggactcactactctgtgcagtcggacatctggagcatggggctctctctggtggagatggcagttggaagataccccattcctcctcctgatgccaaggagctggagctgctgtttggatgccaggtggaaggagacgcggccgaaacgccacccaggccaaggacccctgggaggcccctcagctcatatggaatggatagccgacctcccatggcaatttttgagttgttggattacatcgtcaatgagcctcctccaaaactgcccagtggagtattcagtctggaatttcaggattttgtgaataagtgcttaataaagaaccctgcagagagagcagatctgaagcagctcatggtacatgctttcatcaagagatctgatgccgaggaggtagacttcgcaggctggctctgctccaccattgggcttaaccagcccagcacaccaacccacgctgccagcatctgagcctttgggaagcagcagagaggaatcctctgcccagtggcatgccatgttgctttcaggcctctcccatgcttgtctatgttcagatgtgcatctcatctgtgacaaaggatgaagaacacagcatgtgccaaatcgtacttgtgtcatttttaatattgtctttatcgctatggttactcccctaagtggattggctttgtgcttggggctatttgtctgttcatcaaatacatgccaggttgaactacagtgaaaccctggtgacctgggtggtcttcttactgatgtttgcgctgctgttcatcgtgactcactagctggctgcctgtattgtcaggattctcggacccttggtacttcactcttgctggtgacctctcagtctgaggagagggggccttctgagacccttcacaggcagtgcatgcatgaaaagcatgctttgctgctactgaaatgagcaccagaacgtgtacatcatggtattttatttttgcttttggtatagaactcagcagttcccatttaaaaaaaaaatctaaccagagcccatcactgccatgatagctggggcttcagtctgtctactgtggtgattttagacttctggttgtatttctatatttatttttaaatatactgtgtgggatacttagtggtatatgtctctgagtttggattagtgtttctaaattggtagttattttgaatgtcacaaatggattaaggaatcaacgtatcaagagttctatctttcttccagtctaagtaccaatgctattgtaaacgtgtatagtgcctacaaattgtatgaaaacccttttaaccactttactcaagatgtttatcaaatctaatctcttattctaataaaaatactatcaagttaaagtaaaaaaaaaaaaaaaaaaaacggaattc

SEQ ID NO: 12654 - protein, 392 aa, Rattus norvegicus; identical to SEQ ID NO: 1764

SEQ ID NO: 12655 - DNA, 2222 bp, Homo sapiens
  ref <308>: DATABASE ACCESSION NUMBER: Refseq / NM_002755
  ref <309>: DATABASE ENTRY DATE: 2001-07-05
attcggcacgagggaggaagcgagaggtgctgccctccccccggagttggaagcgcgttacccgggtccaaaatgcccaagaagaagccgacgcccatccagctgaacccggcccccgacggctctgcagttaacgggaccagctctgcggagaccaacttggaggccttgcagaagaagctggaggagctagagcttgatgagcagcagcgaaagcgccttgaggcctttcttacccagaagcagaaggtgggagaactgaaggatgacgactttgagaagatcagtgagctgggggctggcaatggcggtgtggtgttcaaggtctcccacaagccttctggcctggtcatggccagaaagctaattcatctggagatcaaacccgcaatccggaaccagatcataagggagctgcaggttctgcatgagtgcaactctccgtacatcgtgggcttctatggtgcgttctacagcgatggcgagatcagtatctgcatggagcacatggatggaggttctctggatcaagtcctgaagaaagctggaagaattcctgaacaaattttaggaaaagttagcattgctgtaataaaaggcctgacatatctgagggagaagcacaagatcatgcacagagatgtcaagccctccaacatcctagtcaactcccgtggggagatcaagctctgtgactttggggtcagcgggcagctcatcgactccatggccaactccttcgtgggcacaaggtcctacatgtcgccagaaagactccaggggactcattactctgtgcagtcagacatctggagcatgggactgtctctggtagagatggcggttgggaggtatcccatccctcctccagatgccaaggagctggagctgatgtttgggtgccaggtggaaggagatgcggctgagaccccacccaggccaaggacccccgggaggccccttagctcatacggaatggacagccgacctcccatggcaatttttgagttgttggattacatagtcaacgagcctcctccaaaactgcccagtggagtgttcagtctggaatttcaagattttgtgaataaatgcttaataaaaaaccccgcagagagagcagatttgaagcaactcatggttcatgcttttatcaagagatctgatgctgaggaagtggattttgcaggttggctctgctccaccatcggccttaaccagcccagcacaccaacccatgctgctggcgtctaagtgtttgggaagcaacaaagagcgagtcccctgcccggtggtttgccatgtcgcttttgggcctccttcccatgcctgtctctgttcagatgtgcatttcacctgtgacaaaggatgaagaacacagcatgtgccaagattctactcttgtcatttttaatattactgtctttattcttattactattattgttcccctaagtggattggctttgtgcttggggctatttgtgtgtatgctgatgatcaaaacctgtgccaggctgaattacagtgaaatttttggtgaatgtgggtagtcattcttacaattgcactgctgttcctgctccatgactggctgtctgcctgtattttcggactttgacatttgacatttggtggactttatcttgctgggcatactttctctctaggagggagccttgtgagatccttcacaggcagtgcatgtgaagcatgctttgctgctatgaaaatgagcatcagagagtgtacatcatgttattttattattattatttgcttttcatgtagaactcagcagttgacatccaaatctagccagagcccttcactgccatgatagctggggcttcaccagtctgtctactgtggtgatctgtagacttctggttgtatttctatatttattttcagtatactgtgtgggatacttagtggtatgtctctttaagttttgattaatgtttcttaaatggaattatttgaatgtcacaaattgatcaagatattaaaatgtcggatttatctttccccatatccaagtaccaatgctgttgtaaacaacgtgtatagtgcctaaaattgtatgaaaatccttttaaccattttaacctagatgtttaacaaatctaatctcttattctaataaatatactatgaaataaaaaaaaaaggagaaagctaaaaaaaaaaaaaaaaaaaaaaaaaaaaaaaaaaaaaaa

SEQ ID NO: 12656 - protein, 393 aa, Homo sapiens [sequence omitted]

SEQ ID NO: 12657 - DNA, 258 bp, Rattus norvegicus; identical to SEQ ID NO: 2802
  ref <308>: DATABASE ACCESSION NUMBER: EMBL / L05557
  ref <309>: DATABASE ENTRY DATE: 2000-03-04

SEQ ID NO: 12658 - protein, 1243 aa, Rattus norvegicus; identical to SEQ ID NO: 2500
  ref <308>: DATABASE ACCESSION NUMBER: SWISS-Prot / AAB60703
  ref <309>: DATABASE ENTRY DATE: 2002-06-15

SEQ ID NO: 12659 - DNA, 4398 bp, Homo sapiens; identical to SEQ ID NO: 2603
  ref <308>: DATABASE ACCESSION NUMBER: EMBL / J04027
  ref <309>: DATABASE ENTRY DATE: 2000-03-04

SEQ ID NO: 12660 - protein, 1258 aa, Homo sapiens; identical to SEQ ID NO: 2604
  ref <308>: DATABASE ACCESSION NUMBER: SWISS-Prot / P20020
  ref <309>: DATABASE ENTRY DATE: 2002-06-15

SEQ ID NO: 12661 - DNA, 258 bp, Rattus norvegicus; identical to SEQ ID NO: 2802
  ref <308>: DATABASE ACCESSION NUMBER: EMBL / L05557
  ref <309>: DATABASE ENTRY DATE: 2000-03-04

SEQ ID NO: 12662 - protein, 1243 aa, Rattus norvegicus; identical to SEQ ID NO: 2500
  ref <308>: DATABASE ACCESSION NUMBER: SWISS-Prot / AAB60703
  ref <309>: DATABASE ENTRY DATE: 2002-06-15

SEQ ID NO: 12663 - DNA, 4857 bp, Homo sapiens; identical to SEQ ID NO: 2808

SEQ ID NO: 12664 - protein, 1243 aa, Homo sapiens [sequence omitted]

SEQ ID NO: 12665 - DNA, 2179 bp, Rattus norvegicus
  ref <308>: DATABASE ACCESSION NUMBER: EMBL / L07315
  ref <309>: DATABASE ENTRY DATE: 2000-03-04
ggcaggctgtctctctctgggtttcagccgcaggactgaagccaccttctcacccctgacctgcgtgtgctgtggccaccacggaggtgtcaaggcagctgtggaagcagatccctgaggaaccttgaaatgttgatcatctggtggttctggtctctgctggccatctgtgcttctgactccttccggaaccaggcggagaacatcatgagaaccacaccggtcattgacgggcacaacgacttgccttggcaaatgctcactctgttcaacaatcagctccggaaatcagaggccaacctgagcgcgctagcggaaacacacaccaacatccccaagctgagggctggcttcgtgggaggccagttctggtccgcatacatgccttgtgacacccaaaacaaagatgctgtgaaaagaatattggaacagattgatgtcatacatcgcatgtgccagctctatcctgagaccttcgagtgtgtcaccaatagttcagacatcctacaggcgtttcggagggggaaagtggccagtctaattggcgtggaaggtggccacttgattgacagcagcctgggtgttctgcggacactctaccatctgggcatgcggtacctgacccttacgcacaactgcaacacaccctgggccgacaattggctagtggacaaaggagacgacgaggctgagagccaaggactgtcgccctttgggaagcttgtgctgaatgagatgaaccgtctgggtgtcatgattgacttgtcccacgtgtctgtggccaccatgaaggacgctttgcagctatccaaggcaccggtaatcttcagccactcctctgcctacagcgtgtgtccacacaggcggaatgtgcctgacgatgtgctgcagctggtgaagagcacaaacagtttggtgatggtgaacttctataaccagttcgtgtcctgctcagacagcgccaccttgtcccaagtggctgaccacctggaccacatcaagaaggtggcaggcgcaggggctgtgggccttggaggagattatgatggtgttaccaaccttcctgtgggactggaggatgtctctaagtacccagacctgatagcagagcttctcaggaggaactggacagaaaccgaggtcagaggcctgctggctgaaaacctgcttcgggtcttctctgcagtggaactggtaagcaatatcatgcaagttcctgaggaagagactatccctgtggagaagctggatggctcctgcaggacattctatggccactcaagggcccccagcatccacttgcagataggggccctgttggcctctctggcttccctggtcttcagtctgcatcttctgtgacatcccaaggaccagaacctcctccagtgctctccgagctcaggaagactgagcaggcccaaagtccctgttgtccatgccaaaccacatcctttcctgaagaagcagtgggcttacctggggacagctcaagacacaggcacgcaataaacacaatgtcctttaagtgctaagtaggcatctcagccctggaaggttcgtctgagcatggagagagcagattttgtgagaacagctctgggtcaaaaggacacaggagcacctaagttcttggaggggaggactggaaggaacccagaggtctgcagagggtctcatgtgagcagtgactagtttgaaatgtcatggttcatgtttcagtggctaccttccccccattgctgtgcatgtaccacatgcacacaatcccctcgcccctacacacatgtacttatgtgcacacagccacaaacgaagacactcagatgcacatctatatcacacacaggcgcatgcactctgctgacacataccataggagagtcacacatatctatctgggttctgtagtgctgggaagggacccaggtaatctgaatttggtctaatcttggaaggtaggctccagataggatgggtgcctgcactcacgggggtatcccacacagctaacagcaggttttttccagattcacaagcttatggttatcttctgtgtgttacctagcacggttggcagtgtgaagcagggtgccaggctttccagtgaggacattcaaggatgagtcttgtgaataaacttgtgagggacagcgtgaagcagctcccctgaatggcc

SEQ ID NO: 12666 - protein, 410 aa, Rattus norvegicus
  ref <308>: DATABASE ACCESSION NUMBER: SWISS-Prot / AAA41094
  ref <309>: DATABASE ENTRY DATE: 2002-06-15
MLIIWWFWSLLAICASDSFRNQAENIMRTTPVIDGHNDLPWQMLTLFNNQLRKSEANLSALAETHTNIPKLRAGFVGGQFWSAYMPCDTQNKDAVKRILEQIDVIHRMCQLYPETFECVTNSSDILQAFRRGKVASLIGVEGGHLIDSSLGVLRTLYHLGMRYLTLTHNCNTPWADNWLVDKGDDEAESQGLSPFGKLVLNEMNRLGVMIDLSHVSVATMKDALQLSKAPVIFSHSSAYSVCPHRRNVPDDVLQLVKSTNSLVMVNFYNQFVSCSDSATLSQVADHLDHIKKVAGAGAVGLGGDYDGVTNLPVGLEDVSKYPDLIAELLRRNWTETEVRGLLAENLLRVFSAVELVSNIMQVPEEETIPVEKLDGSCRTFYGHSRAPSIHLQIGALLASLASLVFSLHPL

SEQ ID NO: 12667 - DNA, 1738 bp, Homo sapiens
  ref <308>: DATABASE ACCESSION NUMBER: Refseq / NM_004413
  ref <309>: DATABASE ENTRY DATE: 2002-11-05
cgggggggtactgtgcgagccctcaaggaggtggctgttctgtagctggagagctccgtgggtggcaggactgaacttgaacaccagaaacaacccccaagccttgtgacctgggaggcaggaggcgggtctgtctccctgggacttgggtggctgagccgaggtactcgggaccctgtcccgcgcatggcagagtggctcctcacagcctgaagctcatccttctgcacgggccagccaggccagcacagaggcaccagggcagcagtgcacacaggtccccggggaccccaccatgtggagcggatggtggctgtggccccttgtggccgtctgcactgcagacttctttcgggacgaggcagagaggatcatgagggactcccctgtcattgatgggcacaatgacctcccctggcagctgctggatatgttcaacaaccggctgcaggacgagagggccaacctgaccaccttggccggcacacacaccaacatccccaagctgagggccggctttgtgggaggccagttctggtccgtgtacacgccctgcgacacccagaacaaagacgccgtgcggaggacgctggagcagatggacgtggtccaccgcatgtgccggatgtacccggagaccttcctgtatgtcaccagcagtgcaggcattcggcaggccttccgggaagggaaggtggccagcctgatcggcgtggagggcggccactccattgacagcagtttgggcgtcctgcgggcactctatcagctgggcatgcggtacctgaccctcacccacagctgcaacacgccctgggctgacaactggctggtggacacgggagacagcgagccccagagccaaggcttgtcaccctttgggcagcgtgtggtgaaggagctgaaccgtctgggggtcctcatcgacttggctcacgtgtctgtggccaccatgaaggccaccctgcagctgtccagagccccggtcatcttcagccactcctcggcctacagcgtgtgcgcaagccggcgcaacgtgcctgacgacgtcctgaggctggtgaaacagacagacagcctggtgatggtgaacttctacaacaattacatttcctgcaccaacaaggccaacctgtcccaagtggccgaccatctggatcacatcaaggaggtggcaggagccagagccgtgggttttggtggggactttgatggtgttccaagggtccctgaggggctggaggacgtctccaagtatccagacctgatcgctgagctgctcaggaggaactggacggaggcggaggtcaagggcgcactggctgacaacctgctgagggtcttcgaggctgtggaacaggccagcaacctcacacaggctcccgaggaggagcccatcccgctggaccagctgggtggctcctgcaggacccattacggctactcctctggggcttccagcctccatcgccactgggggctcctgctggcctccctcgctcccctggtcctctgtctgtctctcctgtgaaacctgggagaccagagtcccctttagggttcccggagctccgggaagacccgcccatcccaggactccagatgccaggagccctgctgcccacatgcaaggaccagcatctcctgagaggacgcctgggcttacctggggggcaggatgcctggggacagttcaggacacacacacagtaggcccgcaataaaagcaacacccctt

SEQ ID NO: 12668 - protein, 411 aa, Homo sapiens
  ref <308>: DATABASE ACCESSION NUMBER: Refseq / NP_004404
  ref <309>: DATABASE ENTRY DATE: 2002-11-05
MWSGWWLWPLVAVCTADFFRDEAERIMRDSPVIDGHNDLPWQLLDMFNNRLQDERANLTTLAGTHTNIPKLRAGFVGGQFWSVYTPCDTQNKDAVRRTLEQMDVVHRMCRMYPETFLYVTSSAGIRQAFREGKVASLIGVEGGHSIDSSLGVLRALYQLGMRYLTLTHSCNTPWADNWLVDTGDSEPQSQGLSPFGQRVVKELNRLGVLIDLAHVSVATMKATLQLSRAPVIFSHSSAYSVCASRRNVPDDVLRLVKQTDSLVMVNFYNNYISCTNKANLSQVADHLDHIKEVAGARAVGFGGDFDGVPRVPEGLEDVSKYPDLIAELLRRNWTEAEVKGALADNLLRVFEAVEQASNLTQAPEEEPIPLDQLGGSCRTHYGYSSGASSLHRHWGLLLASLAPLVLCLSLL

SEQ ID NO: 12669 - DNA, 1843 bp, Rattus norvegicus
  ref <308>: DATABASE ACCESSION NUMBER: EMBL / L08493
  ref <309>: DATABASE ENTRY DATE: 2002-02-08
gggagccactctgccctctcctcgcaccctgcacagggcatcttgagaggctggaaacgtgaacaggcttaaagtatggcatgtggcgaagatggtttctgtccagaaggtacctgcgatcgtgctgtgctccggggtcagcctcgccctcctgcacgtcctgtgcctggcgacttgtttaaacgaatccccaggacagaattcaaaggacgagaaattgtgcccggaaaattttacccgtatcctggacagtttgctggatggttatgacaacagactgcgtcctggatttgggggtcctgttacagaggtgaaaactgatatatatgtcaccagctttggacccgtttctgatgttgaaatggaatacacaatggatgtgttcttcagacagacatggattgacaaaagactgaaatatgatggccccattgaaatcctgaggttgaacaatatgatggtcaccaaagtttggacccctgatactttcttcaggaatggaaagaaatctgtctcccataacatgacagctccaaataaactttttagaattatgagaaatggcactattttatacacaatgagactcaccataagtgcggagtgtcccatgagactggtggattttcctatggacggtcatgcctgccctttgaaatttgggagttatgcatatcccaagagtgagatgatctacacctggaccaaaggccctgagaagtcagtggaggtaccaaaggagtcctcgagcttagttcagtatgatctaattggccagactgtatccagtgagactatcaaatctattacaggtgaatacattgttatgaccgtgtactttcacctcagacggaagatgggctattttatgattcagacatatatcccgtgcatcatgacagtgatcctttctcaagtttccttctggatcaataaggagtctgttccagccagaactgtatttggaataaccacagtcctcacgatgaccaccctaagcatcagtgctcggcattctttgcccaaagtgtcctatgcgactgccatggattggttcatagctgtctgttttgcttttgtattttcggctcttattgagtttgctgctgtcaactatttcaccaacattcaaatgcaaaaagccaaaaagaagatatcaaaacctcctccagaagttccagctgccccagtactgaaggaaaaacatacagaaacatctcttcagaatacacatgctaatttgaacatgaggaaaagaacaaatgcattagtccactcagaatcagatgtcaacagcagaactgaggtggggaaccattccagcaagaccaccgctgcccaggagtcttctgaaaccactcctaaggcccacttggcttccagtccaaatccattcagcagggcaaatgcagctgagactatctctgcagcagcaagaggtctttcgtctgccgcatcgccctctcctcacgggacactgcagccagctcctttgcggtcggcgtctgctcgcccggcatttggagctagacttgggcgcattaagacaacagttaatacgacaggggtgcctgggaatgtgtcagccacacctcctccctctgctccaccaccttctggatctggcacaagtaaaatagacaaatatgctcgtattctctttccagtcacatttggggcatttaacatggtctactgggtggtttatttatctaaggacaccatggagaaatcagaaagtctaatgtaattttgttgctaaagcaatttcataaccgtgatggaaatacagactgtctttttaaatgtttttaaaggtaagtattctttactaaaataaaaa

SEQ ID NO: 12670 - protein, 552 aa, Rattus norvegicus
  ref <308>: DATABASE ACCESSION NUMBER: SWISS-Prot / AAC42032
  ref <309>: DATABASE ENTRY DATE: 2002-06-15
MVSVQKVPAIVLCSGVSLALLHVLCLATCLNESPGQNSKDEKLCPENFTRILDSLLDGYDNRLRPGFGGPVTEVKTDIYVTSFGPVSDVEMEYTMDVFFRQTWIDKRLKYDGPIEILRLNNMMVTKVWTPDTFFRNGKKSVSHNMTAPNKLFRIMRNGTILYTMRLTISAECPMRLVDFPMDGHACPLKFGSYAYPKSEMIYTWTKGPEKSVEVPKESSSLVQYDLIGQTVSSETIKSITGEYIVMTVYFHLRRKMGYFMIQTYIPCIMTVILSQVSFWINKESVPARTVFGITTVLTMTTLSISARHSLPKVSYATAMDWFIAVCFAFVFSALIEFAAVNYFTNIQMQKAKKKISKPPPEVPAAPVLKEKHTETSLQNTHANLNMRKRTNALVHSESDVNSRTEVGNHSSKTTAAQESSETTPKAHLASSPNPFSRANAAETISAAARGLSSAASPSPHGTLQPAPLRSASARPAFGARLGRIKTTVNTTGVPGNVSATPPPSAPPPSGSGTSKIDKYARILFPVTFGAFNMVYWVVYLSKDTMEKSESLM

SEQ ID NO: 12671 - DNA, 1703 bp, Homo sapiens
  ref <308>: DATABASE ACCESSION NUMBER: Refseq / NM_000809
  ref <309>: DATABASE ENTRY DATE: 2000-10-31
gaaacgtgaacaggcttgaagtatggcatgttgcaaagatggtttctgccaagaaggtacccgcgatcgctctgtccgccggggtcagtttcgccctcctgcgcttcctgtgcctggcggtttgtttaaacgaatccccaggacagaaccaaaaggaggagaaattgtgcacagaaaatttcacccgcatcctggacagtttgctcgatggttatgacaacaggctgcgtcctggatttgggggtcctgttacagaagtgaaaactgacatatatgtcaccagctttggacctgtttctgatgttgaaatggaatacacaatggatgtgttcttcaggcagacatggattgacaaaagattaaaatatgacggccccattgaaattttgagattgaacaatatgatggtaacgaaagtgtggacccctgatactttcttcaggaatggaaagaaatctgtctcacataatatgacagctccaaataagctttttagaattatgagaaatggtactattttatacacaatgagactcaccataagtgcggagtgtcccatgagattggtggattttcccatggatggtcatgcatgccctttgaaattcgggagttatgcctatccaaagagtgagatgatctatacctggacaaaaggtcctgagaaatcagttgaagttccgaaggagtcttccagcttagttcaatatgatttgattgggcaaaccgtatcaagtgaaaccatcaaatcaattacgggcgaatatattgttatgacggtttacttccacctcagacggaagatgggttattttatgattcagacctatattccgtgcattatgacagtgattctttctcaagtttcattttggataaataaagaatcagttcccgctaggactgtatttggaataacaactgtcctcaccatgaccacactaagcatcagtgcacgacattctttgcccaaagtgtcctacttgaccgccatggactggttcatagctgtctgctttgcttttgtattttcggcccttatcgagtttgctgctgtcaactatttcaccaatattcaaatggaaaaagccaaaagaaagacatcaaagccccctcaggaagttcccgctgctccagtgcagagagagaagcatcctgaagcccctctgcaggatacaaatgccaatttgaacatgagaaaaagaacaaatgctttggttcactctgaatctgatgttggcaacagaactgaggtgggaaaccattcaagcaaatcttccacagttgttcaagaatcttctaaaggcacacctcggtcttacttagcttccagtccaaacccattcagccgtgcaaatgcagctgaaaccatatctgcagcaagagcacttccatctgcttctcctacttctatccgaactggacatatgcctcgaaaggcttcagttggatctgcttctactcgtcacgtgtttggatcaagactgcagaggataaagaccacagttaataccataggggctactgggaagttgtcagctactcctcctccatcggctccaccaccttctggatctggcacaagtaaaatagacaaatatgcccgtattctctttccagtcacatttggggcatttaacatggtttattgggttgtttatttatctaaggacactatggagaaatcagaaagtctaatgtaa

SEQ ID NO: 12672 - protein, 554 aa, Homo sapiens [sequence omitted]

SEQ ID NO: 12673 - DNA, 858 bp, Rattus norvegicus
  ref <308>: DATABASE ACCESSION NUMBER: EMBL / L10152
  ref <309>: DATABASE ENTRY DATE: 2000-03-04
tgcaaaaacctgttgagcctgggtcagcagatgctgcgccggaaagtggtggactgcagccgggaggagagccggctgtcccgctgcctcaacacctatgatctggtagctcttggggtgggcagcaccttgggcgctggtgtctacgtcctagccggtgcagtggcccgtgagaatgctggtcctgccatcgtcatctccttcctgatcgctgctcttgcctcagtgctggccggcctgtgctatggcgagtttggtgcccgtgtccccaagacgggctcagcctacctctacagctatgtgacagtgggggagctctgggccctcatcactggctggaacctgattctctcctacatcatcggtacatccagcgtggcaagagcctggagtgcaacttttgacgagctgataggcaaacccatcggagagttctcgcgtcaacacatggccctgaacgcccctggggtgctggcccaaaccccggatatatttgctgtgattataattatcatcctgacaggactgttaactctcggtgtgaaagaatcagccatggtcaacaaaatcttcacctgtatcaatgtcctggtcttgtgcttcatcatggtgtcgggattcgtgaaaggctccattgagaactggcagctcacggagaataaatccagtcctctctgtgggaacaatgacacaaacgtgaaatacggtgagggagggttcatgccctttggattctctggtgtcctgtcaggggcagcgacctgcttttatgccttcgtgggctttgactgcatcgccaccacaggggaagaagtcaagaacccccagaaggccattcctgtgggcatcgtggcgtcc

SEQ ID NO: 12674 - DNA, 6469 bp, Rattus norvegicus
  ref <308>: DATABASE ACCESSION NUMBER: EMBL / L11587
  ref <309>: DATABASE ENTRY DATE: 2000-03-04
cggcccgccaggcagctccggccgtgcgcgcacgccgagccgccggagcccgggccgacccgtgccggagcagcatgcggagcccgcagccgctgctcctctggacacctcagcctgaggcctctccgtgagttacggggacaccatcccccaccagggcggaggctggaggccactgccaagcatggcgcccacctggagacccagcgtggtgtctgtggtgggtcctgtggggctcttccttgtactgctggccagagggtgcttggctgaagagccacccagatttatcagagagcccaaggatcagattggtgtgtcaggaggcgtggcctccttcgtgtgccaggccacaggtgaccctaagccacgggtgacctggaacaagaagggcaagaaagtgaactcacagcgctttgagaccattgactttgacgagagctcgggggccgtgctgaggatccagccacttcggacaccccgggatgagaacgtgtacgagtgtgtggcccagaactcggtgggggagatcacagttcatgcgaagctcaccgtcctgcgagaggaccagctgcctcctggcttccccaacattgacatgggcccccagttgaaggttgtagagcgcacacgcacagccaccatgctctgtgctgccagcggaaaccctgaccctgagatcacctggttcaaggacttcctgcctgtggaccccagtgccagcaatgggcggatcaagcagcttcggtcaggtgccctgcagattgagagcagcgaggagacagaccagggcaagtacgagtgtgtggccaccaacagcgctggggtgcgctactcatcacctgccaacctctacgtgcgagtccgccgtgtggccccccgcttctccatcctgcccatgagccacgagatcatgcccggtgggaatgtgaatatcacttgtgtggctgtgggctcacccatgccctacgtgaagtggatgcagggggcagaggacctgacgcctgaggatgacatgcccgtgggtcggaatgtcctcgaactcacggatgtcaaagactcagccaactatacttgtgtggccatgtccagcctgggagtgatcgaggccgttgctcagatcactgtaaaatctctccccaaagcccctgggactcccgtggtgacggagaacactgctaccagtatcactgtcacatgggactcaggcaatcctgaccctgtgtcctactacgtaattgagtataaatccaaaagccaggatgggccgtatcagatcaaagaagacatcaccaccacgcgctacagcatcggcggcctgagccccaactctgagtatgagatctgggtgtcagctgtcaactccatcggccagggcccccccagtgagtcggtggtgacccgcacaggcgagcaggcaccagccagtgctcccaggaatgttcaggcgcgcatgctcagtgccaccaccatgattgtgcagtgggaggagcccgtggagcccaatggcctgatccgtggctaccgcgtctactacaccatggagcccgagcatccggtgggcaactggcagaagcacaatgtggacgacagtcttctgaccactgtgggcagcctgctagaggatgagacctacactgtgagagtgctcgccttcacatcggtgggcgatgggccactgtcagaccccatccaggtcaagacccagcagggagtgcccggccagcccatgaacttgcgggctgaggccaagtcagagaccagcattgggctctcgtggagtgcaccacggcaggagagtgtcattaagtatgaactgctcttccgggagggcgaccgaggccgagaggtggggcgaaccttcgacccaaccacagcctttgtggtggaggacctcaagcccaatacggagtacgcgttccggctggcggctcgctcgccgcagggcctgggcgccttcaccgcggttgtgtgccagcgcacactgcaggccaaaccgtcagccccccctcaagacgttaagtgcaccagcttgcgctccacggccatattgatccttctggaagctttggagaaatggacggagtaccgtgtcaccgccgtggcttacacagaggtgggaccagggcccgagagctcgcccgtggtcgtccgcaccgatgaggacgtgcccagcgcgcccccgcggaaggtggaggcggaggcgctcaacgccacggctatccgagtgctgtggcgctcgcccacgcccggcaggcagcacgggcagatccgcggctaccaggtccactatgtgcgcatggagggcaccgaggcccgcgggccaccgcgcatcaaggacatcatgctggcggatgcccaggaaatggtgatcacaaacctccagcctgagactgcttactctatcacagtagccgcgtataccatgaaaggcgatggcgctcgcagcaaaccgaaggtggtggtgaccaagggagcagtgctgggccgccccaccctgtcggtgcagcagacccccgagggcagcctgctggcgcgctgggagccccccgcggacgcggctgaggacccagtgcttggctaccgcctgcagtttgggcgcgaagacgcggccccggccacgttggaactggcggcgtgggagcggcggttcgcggcgcctgcacacaagggcgccacctatgtgtttcggctggcggcgcggggccgcgcggggctgggcgaggaggcctcggcggcgctgagcatccctgaggacgctccgcgtggcttcccgcagatcctgggccccgcgggcaacgtgtccgcgggctccgtaatactgcgctggctgccacccgtgcccgccgagggcaacggcgccatcatcaagtacacggtgtccgtgcgggaggccggcaccccagggcccgcgacagagaccgaactggcggcggcggcccagccgggggccgagacagcgctcacactacaggggctgcggccggagacggcctacgagctgcgcgtgcgcgcgcacacgcgtcggggccccggccccttctcacccccgctgcgatacaggcttgcgcgggacccagtctcccccaagaacttcaaggtgaagatgatcatgaaaacttcagtgctgctaagctgggagttccctgacaactataactcacccacgccctacaagatccagtacaatggactcacactggacgtggatggccgcactaccaagaagctgatcacgcacctcaagccacacaccttctataacttcgtgctcaccaaccgtggcagcagcctgggaggcctgcagcagacggtcaccgccaggaccgccttcaacatgctcagtggcaagcctagtgtcgccccaaagcctgacaacgatggttccattgtggtctacctgcctgatggccagagtcccgtgacagtgcagaactacttcattgtgatggtcccacttcggaagtctcgtggtggccagttccctatcctactaggtagtccagaggacatggatctggaggagctcatccaggacctctcccggctgcagaggcgcagcctgcgccactcaagacagctggaggtgcctcggccttacatcgccgctcggttctccatcctgccagctgtcttccatcctgggaaccagaagcaatatggtggctttgacaacaggggcttggagccaggccaccgttatgtcctctttgtacttgctgtgctgcagaagaatgagcctacatttgcagccagtcccttctcagaccccttccaactggacaacccagacccgcagcccattgtggatggcgaggagggcctcatctgggtgatcgggcccgtgctggccgtggtcttcatcatctgcatcgtaattgccatcctgctgtacaagaacaagcctgacagcaaacgcaaggactcagagccccgcaccaaatgcttattgaacaatgcagacctcgccccccatcaccccaaggaccctgtggaaatgcgacgtatcaacttccagacgccaggtatgctcagccacccgcccattcccatcacagacatggctgaacacatggagagactcaaagccaacgacagcctcaagctctcccaggagtatgagtccatcgaccctggccagcagttcacttgggaacattcgaacctggaggccaacaagccaaagaaccgatacgccaatgtcatcgcctatgaccattcacgagtcatcctgcagcctttagaaggcatcatgggtagtgattacatcaatgccaactatgtggacggctatcggcggcagaacgcatacatcgccacgcaggggcccctgcctgagacctttggggacttctggcggatggtgtgggagcagcggtcagccactgtggtcatgatgacacggctggaggagaaatcacgggtcaaatgtgaccagtactggcctaaccgaggcaccgagacatacggcttcatccaggtcaccctactagatactatggagctggccaccttctgtgtcaggaccttttctctacacaagaatggctctagtgagaagcgtgaggtacgacattttcagttcacagcatggcctgaccacggggtacccgagtaccccacacccttcctggcgtttctgcgcagagtcaagacctgcaacccgcctgacgctggcccagttgtggtccactgcagcgcgggtgtggggcgtactggctgcttcattgtaattgatgccatgttggagcgcatcagaacagagaagacggtggatgtgtacggacacgtgacactcatgcggtcacagcgcaactacatggtgcagacagaggatcagtatagcttcatccacgaggcactgctggaggctgtgggctgtggcaataccgaggtccccgcgcgcagcctctacacctatatccagaagctggcccaggtggagcctggcgagcatgtcacaggaatggagcttgagttcaagaggcttgccagctccaaggcacacacttcgagattcatcactgccagcctgccttgcaacaagtttaagaaccgcctggtgaacatcctgccgtacgagagctcgcgtgtctgcctgcagcccattcgtggtgtcgagggctctgactacatcaatgccagcttcatcgacggctacagacagcagaaagcctacattgcaacgcagggtccactggcagagaccacagaggacttctggcgtgccctgtgggagaacaactccactattgtggtaatgctcaccaagctccgcgagatgggccgggagaagtgccaccagtactggccagctgaacgctctgcccgctaccagtactttgtggttgacccgatggcagagtataacatgccacagtacattctgcgtgagtttaaggtcacagatgcccgggatggccagtcccggaccgtccgacagttccagttcacggactggccagagcagggtgcacccaagtcaggggaaggcttcattgacttcatcggccaagtgcataagaccaaggagcagtttggccaggatggccccatctcggtgcactgtagtgctggagtgggcaggaccggagtattcatcactctgagcatcgtgctggagcgaatgcgctacgagggggtggtggacattttccagacagtgaaggtgcttcggacccagcggcctgccatggtgcagacagaggatgagtaccagttctgcttccaggcggcgttggaatacctgggcagctttgatcattatgcaacataagccatggccccgcccaacacctcgacccagctccaagtgccctgaatgtgagcccagccctcggtgctgggtgggaggcggcccagggaggaaacctcctctccctggagacaggcactgccttctgaagggcacattcctcattcccttctgactccaaaacgaggttccagggtggggggtagggtggagagtagaggagccactgctcccatagctggggtcacaagggacagaactctgctcccacacttccctgcctgcggaattccgaaaacaattctatttccaaagctacagaagagcacacagtctgacttgtaggtgggtgactgatgagaatgctgttatggtatcagacgtgtagtgtattgctaggaataagcctgtgaggatttgtactatgaggcatactcctagtagagaaccgaagtttcatcatgatgagatgtttgatgtggggtggggtgttgagggggttttttttgttcaagccaaaggtaactttattgattcatgaatctggaaagttcaagtacaggttttattccagaaaagaactgattctgagcacagtgtagtcagtgctccatcactctgggttgcccaaaaaaaagacttgcacaatgattccagttgacatgcaacatggacagaaacatttcacaaagccacacccatatatgaaggagg

SEQ ID NO: 12675 - protein, 1863 aa, Rattus norvegicus
  ref <308>: DATABASE ACCESSION NUMBER: SWISS-Prot / AAC37656
  ref <309>: DATABASE ENTRY DATE: 2003-02-01
MAPTWRPSVVSVVGPVGLFLVLLARGCLAEEPPRFIREPKDQIGVSGGVASFVCQATGDPKPRVTWNKKGKKVNSQRFETIDFDESSGAVLRIQPLRTPRDENVYECVAQNSVGEITVHAKLTVLREDQLPPGFPNIDMGPQLKVVERTRTATMLCAASGNPDPEITWFKDFLPVDPSASNGRIKQLRSGALQIESSEETDQGKYECVATNSAGVRYSSPANLYVRVRRVAPRFSILPMSHEIMPGGNVNITCVAVGSPMPYVKWMQGAEDLTPEDDMPVGRNVLELTDVKDSANYTCVAMSSLGVIEAVAQITVKSLPKAPGTPVVTENTATSITVTWDSGNPDPVSYYVIEYKSKSQDGPYQIKEDITTTRYSIGGLSPNSEYEIWVSAVNSIGQGPPSESVVTRTGEQAPASAPRNVQARMLSATTMIVQWEEPVEPNGLIRGYRVYYTMEPEHPVGNWQKHNVDDSLLTTVGSLLEDETYTVRVLAFTSVGDGPLSDPIQVKTQQGVPGQPMNLRAEAKSETSIGLSWSAPRQESVIKYELLFREGDRGREVGRTFDPTTAFVVEDLKPNTEYAFRLAARSPQGLGAFTAVVCQRTLQAKPSAPPQDVKCTSLRSTAILILLEALEKWTEYRVTAVAYTEVGPGPESSPVVVRTDEDVPSAPPRKVEAEALNATAIRVLWRSPTPGRQHGQIRGYQVHYVRMEGTEARGPPRIKDIMLADAQEMVITNLQPETAYSITVAAYTMKGDGARSKPKVVVTKGAVLGRPTLSVQQTPEGSLLARWEPPADAAEDPVLGYRLQFGREDAAPATLELAAWERRFAAPAHKGATYVFRLAARGRAGLGEEASAALSIPEDAPRGFPQILGPAGNVSAGSVILRWLPPVPAEGNGAIIKYTVSVREAGTPGPATETELAAAAQPGAETALTLQGLRPETAYELRVRAHTRRGPGPFSPPLRYRLARDPVSPKNFKVKMIMKTSVLLSWEFPDNYNSPTPYKIQYNGLTLDVDGRTTKKLITHLKPHTFYNFVLTNRGSSLGGLQQTVTARTAFNMLSGKPSVAPKPDNDGSIVVYLPDGQSPVTVQNYFIVMVPLRKSRGGQFPILLGSPEDMDLEELIQDLSRLQRRSLRHSRQLEVPRPYIAARFSILPAVFHPGNQKQYGGFDNRGLEPGHRYVLFVLAVLQKNEPTFAASPFSDPFQLDNPDPQPIVDGEEGLIWVIGPVLAVVFIICIVIAILLYKNKPDSKRKDSEPRTKCLLNNADLAPHHPKDPVEMRRINFQTPGMLSHPPIPITDMAEHMERLKANDSLKLSQEYESIDPGQQFTWEHSNLEANKPKNRYANVIAYDHSRVILQPLEGIMGSDYINANYVDGYRRQNAYIATQGPLPETFGDFWRMVWEQRSATVVMMTRLEEKSRVKCDQYWPNRGTETYGFIQVTLLDTMELATFCVRTFSLHKNGSSEKREVRHFQFTAWPDHGVPEYPTPFLAFLRRVKTCNPPDAGPVVVHCSAGVGRTGCFIVIDAMLERIRTEKTVDVYGHVTLMRSQRNYMVQTEDQYSFIHEALLEAVGCGNTEVPARSLYTYIQKLAQVEPGEHVTGMELEFKRLASSKAHTSRFITASLPCNKFKNRLVNILPYESSRVCLQPIRGVEGSDYINASFIDGYRQQKAYIATQGPLAETTEDFWRALWENNSTIVVMLTKLREMGREKCHQYWPAERSARYQYFVVDPMAEYNMPQYILREFKVTDARDGQSRTVRQFQFTDWPEQGAPKSGEGFIDFIGQVHKTKEQFGQDGPISVHCSAGVGRTGVFITLSIVLERMRYEGVVDIFQTVKVLRTQRPAMVQTEDEYQFCFQAALEYLGSFDHYAT

SEQ ID NO: 12676 - DNA, 303 bp, Rattus norvegicus
  ref <308>: DATABASE ACCESSION NUMBER: EMBL / L13202
  ref <309>: DATABASE ENTRY DATE: 2000-03-04
ctggtgaagccaccctactcttacatcgcgctcatcaccatggccatcctgcagagcccgcagaagaagctgaccctgagtggcatctgcgagttcatcagcaaccgcttcccgtactaccgggagaagttccccgcctggcagaacagcatccgccacaacctgtcgctcaacgactgcttcgtcaagatcccccgcgagccgggcaacccgggcaagggtaactactggaccctggacccccagtccgaggacatgttcgacaacggcagcttcctgcggcgccggaagcgcttcaagcgc

SEQ ID NO: 12677 - protein, 101 aa, Rattus norvegicus
  ref <308>: DATABASE ACCESSION NUMBER: SWISS-Prot / AAA41319
  ref <309>: DATABASE ENTRY DATE: 2002-06-15
LVKPPYSYIALITMAILQSPQKKLTLSGICEFISNRFPYYREKFPAWQNSIRHNLSLNDCFVKIPREPGNPGKGNYWTLDPQSEDMFDNGSFLRRRKRFKR

SEQ ID NO: 12678 - DNA, 1437 bp, Homo sapiens
  ref <308>: DATABASE ACCESSION NUMBER: Refseq / NM_012183
  ref <309>: DATABASE ENTRY DATE: 2002-11-05
atgaccctctccggcggcggcagcgccagcgacatgtccggccagacggtgctgacggccgaggacgtggacatcgatgtggtgggcgagggcgacgacgggctggaagagaaggacagcgacgcaggttgcgatagccccgcggggccgccggagctgcgcctggacgaggcggacgaggtgcccccggcggcaccccatcacggacagcctcagccgccccaccagcagcccctgacattgcccaaggaggcggccggagccggggccggaccggggggcgacgtgggcgcgccggaggcggacggctgcaagggcggtgttggcggcgaggagggcggcgcgagcggcggcgggcctggcgcgggcagcggttcggcgggaggcctggccccgagcaagcccaagaacagcctagtgaagccgccttactcgtacatcgcgctcatcaccatggccatcctgcagagcccgcagaagaagctgaccctgagcggcatctgcgagttcatcagcaaccgcttcccctactacagggagaagttccccgcctggcagaacagcatccgccacaacctctcactcaacgactgcttcgtcaagatcccccgcgagccgggcaacccgggcaagggcaactactggaccctggacccgcagtccgaggacatgttcgacaacggcagcttcctgcggcgccggaaacgcttcaagcgccaccagcaggagcacctgcgcgagcagacggcgctcatgatgcagagcttcggcgcttacagcctggcggcggcggccggcgccgcgggaccctacggccgcccctacggcctgcaccctgcggcggcggccggtgcctattcgcacccggcagcggcggcggccgcggctgctgcggcggcgctccagtacccgtacgcgctgccgccggtggcaccggtgctgcctcccgctgtgccgctgctgccctcgggcgagctgggccgcaaagcggccgccttcggctcacagctcggcccgggcctgcagctgcagctcaatagcctgggcgccgccgcggccgctgcgggcacagcgggcgccgcgggcaccaccgcgtcgctcatcaagtccgagccaagcgcgcggccgtcgttcagcatcgagaacatcataggtgggggccccgcggctcctgggggctcggcggtgggcgctggggtcgccggcggcactgggggttcagggggcggcagcacggcgcagtcgtttctgcggccacccgggaccgtgcagtcggcagcgctcatggccacccaccaaccgctgtcgctgagccggacgactgccaccatcgcgcccattcttagcgtgccactctccggacagtttctgcagcccgcagcctcggccgccgccgctgctgcggccgccgctcaagccaaatggccggcgcaatag

SEQ ID NO: 12679 - protein, 478 aa, Homo sapiens
  ref <308>: DATABASE ACCESSION NUMBER: Refseq / NP_036315
  ref <309>: DATABASE ENTRY DATE: 2002-11-05
MTLSGGGSASDMSGQTVLTAEDVDIDVVGEGDDGLEEKDSDAGCDSPAGPPELRLDEADEVPPAAPHHGQPQPPHQQPLTLPKEAAGAGAGPGGDVGAPEADGCKGGVGGEEGGASGGGPGAGSGSAGGLAPSKPKNSLVKPPYSYIALITMAILQSPQKKLTLSGICEFISNRFPYYREKFPAWQNSIRHNLSLNDCFVKIPREPGNPGKGNYWTLDPQSEDMFDNGSFLRRRKRFKRHQQEHLREQTALMMQSFGAYSLAAAAGAAGPYGRPYGLHPAAAAGAYSHPAAAAAAAAAAALQYPYALPPVAPVLPPAVPLLPSGELGRKAAAFGSQLGPGLQLQLNSLGAAAAAAGTAGAAGTTASLIKSEPSARPSFSIENIIGGGPAAPGGSAVGAGVAGGTGGSGGGSTAQSFLRPPGTVQSAALMATHQPLSLSRTTATIAPILSVPLSGQFLQPAASAAAAAAAAAQAKWPAQ

SEQ ID NO: 12680 - DNA, 303 bp, Rattus norvegicus; identical to SEQ ID NO: 12676
  ref <308>: DATABASE ACCESSION NUMBER: EMBL / L13202
  ref <309>: DATABASE ENTRY DATE: 2000-03-04

SEQ ID NO: 12681 - protein, 101 aa, Rattus norvegicus; identical to SEQ ID NO: 12677
  ref <308>: DATABASE ACCESSION NUMBER: SWISS-Prot / AAA41319
  ref <309>: DATABASE ENTRY DATE: 2002-06-15

SEQ ID NO: 12682 - DNA, 1437 bp, Homo sapiens; identical to SEQ ID NO: 12678
  ref <308>: DATABASE ACCESSION NUMBER: Refseq / NM_012183
  ref <309>: DATABASE ENTRY DATE: 2002-11-05

SEQ ID NO: 12683 - protein, 478 aa, Homo sapiens; identical to SEQ ID NO: 12679
  ref <308>: DATABASE ACCESSION NUMBER: Refseq / NP_036315
  ref <309>: DATABASE ENTRY DATE: 2002-11-05

SEQ ID NO: 12684 - DNA, 116 bp, Rattus norvegicus
  ref <308>: DATABASE ACCESSION NUMBER: EMBL / L13237
  ref <309>: DATABASE ENTRY DATE: 2000-03-04
tttaaagtaatccttggctacctagtgagtgtaaggccagcctggaatcaataagagttggtttcaaagaagcaggaggagaaggaggaacaggaacaggaggaggagcaggggga

SEQ ID NO: 12685 - DNA, 7325 bp, Rattus norvegicus
  ref <308>: DATABASE ACCESSION NUMBER: EMBL / L15453
  ref <309>: DATABASE ENTRY DATE: 2000-03-04
atctccggtgaccttgcagacccaggaatgaaacaagagcatttggagcgattcatacctgttcttcatggatctctctgtcagaaacctcaggcgatggagactcggaccagagcaggaaccgacaaggaaccccagtaccggcctcggggccggcggccgcctacaagcagtcaaaagcgcagagggcgactatggctttgtacaaccccataccagtccggcagaactgtttcacggtcaacagatccctgttcatcttcggagaagataacattgtcaggaaatatgccaagaaactcatcgattggccgccatttgagtacatgatcctggccaccatcattgccaactgcatcgtcttggccctggagcagcatcttcctgaggatgacaagaccccaatgtcccgaagactggagaagacagaaccatattttattggaatcttctgctttgaagctgggatcaaaatcgtggctctaggattcatcttccataagggttcgtacctccgtaacggctggaatgtcatggacttcattgtggtcctcagtggcatcctggccactgcaggaacccatttcaacacccacgtggacctgcggaccctccgggctgtgcgtgtcctgaggcccttaaagctcgtgtcaggaatacctagcctgcagatcgtgctgaagtccatcatgaaggccatggtgcctcttctgcagattggccttctgctcttctttgccattctcatgtttgccatcattggcttggagttctacagtggcaagttgcatcgagcatgcttcatgaacaattcaggtattctagagggatttgatcctcctcacccgtgtggtgtacagggctgcccggctggttatgaatgtaaggactggatcggccccaatgacgggatcacccagtttgacaacatcctttttgctgtgctgactgtcttccaatgcatcactatggaagggtggaccactgtgctgtacaataccaatgatgccttaggagccacctggaactggctgtacttcatccccctcatcatcatcggatccttctttgttctcaaccttgtcctgggcgtgctttccggggaatttgccaaagaaagagagagagtggagaaccgaagagcattcatgaagctccggcgtcagcaacagattgagcgcgagttgaatggctaccgcgcctggatagacaaagcagaggaagtcatgcttgctgaagaaaataaaaactcgggaacatcagccttggaagtgcttcgaagggcaaccatcaaaaggagccggacggaggccatgacccgagactccagcgatgagcactgcgttgatatctcttcagtgggcacacctcttgccagagccagtatcaagagcacaaaagtagatggagcctcctatttccggcacaaggaacggcttctgcgtatctctatccgacacatggtcaagtcgcaagtgttctactggatcgtcctgagtgttgtggctctcaatactgcctgtgtggccatcgttcatcacaaccagccacagtggctcactcacctcctctactatgcagaatttttgtttctgggactcttcctgttggagatgtccctgaagatgtatggcatggggccacgcctttattttcactcatccttcaactgctttgattttggggtcacagtgggcagcatctttgaggtcgtttgggcaatcttccgacctggcacatcttttggaatcagtgtcttacgagctctccggctcctaaggatatttaaaataaccaagtattgggcatccctccggaatctggttgtttccttgatgagctccatgaagtctatcatcagcttactcttcctcctcttcctcttcattgttgtctttgctctcctgggaatgcagctctttggaggcaggtttaactttaatgatgggactccttcggctaattttgataccttccctgcagctatcatgacagtgttccagatcctgacgggggaagactggaatgaagtgatgtataacggcatccgctcccagggtggggtgagctcaggcatgtggtctgccatctacttcattgtgctcaccttgtttggaaactacacactgctgaatgtattcttggctatcgctgtggacaatctcgccaatgcccaggaactgaccaaggatgagcaggaggaagaagaagccttcaaccagaaacatgcactgcagaaggccaaggaggtcagcccgatgtctgctcccaacatgccttccattgaaagagacagaaggagaagacaccacatgtcgatgtgggagccgcgcagcagccacctgagggagaggagacgccgacaccacatgtctgtgtgggaacagcgcaccagccagctgaggaggcacatgcaaatgtctagccaagaagccctcaacaaagaggaggccccaccaatgaaccccctcaatccactcaacccactgagtcctctcaacccactcaatgctcatcctagcctctatcggaggcccaggcccattgagggcctagccctgggcttgggtcttgaaaaatgtgaagaggagcgtatcagccgtggaggttctctcaagggggacataggtggcctgactagcgtcctggacaaccagaggagccctttgtccctgggcaaacgggagccaccgtggctgcccagatcctgtcatggaaactgtgacccaacccagcaggagactgggggaggagagactgtggtgacttttgaggaccgggccaggcacaggcagagtcagaggcgaagccggcatcgccgagtcaggactgagggcaaggagtctgcctctgcctccagaagcaggtctgccagccaggagcggagtctggatgaaggggtgtccatcgatggggagaaggaacacgagcctcagagcagccacaggagcaaggagccaaccatccatgaagaagagagaactcaggacttaaggaggaccaacagtctgatggtccccaggggctcaggactggtaggagctcttgatgaggcagaaacacctctagtccagccccaacctgagctggaagtggggaaggatgcagctctgacagagcaggaggctgaaggcagcagcgagcaagccctgcttgcggatgtacagctggatgtgggccggggcattagccagagtgaacctgacctctcctgcatgacaaccaacatggacaaggctaccactgagagcaccagtgtcacagtcgccatccctgacgtggaccccttggtggactcaacagtggtgaacattagcaacaagacggatggagaagccagtcccttgaaggaagcagagaccaaagaggaagaggaagaggtggaaaagaagaagcagaagaaggagaagcgggagactggaaaagccatggtgccccatagctctatgttcatcttcagcaccactaacccgatccgcaaggcttgccactacattgtgaatctacgctactttgagatgtgcattctcttggtgattgcggccagcagcattgccctggcagctgaggaccctgtactaactaactcagagcgtaacaaagtcctgagatatttcgactatgttttcacaggagtgtttacctttgagatggtgataaagatgatagaccaaggcttgatcctgcaggatggatcgtacttccgagacctctggaatatcctggactttgtggtagtggttggtgcattggtagcatttgctctggcgaacgctttgggaaccaacaaggggcgggatatcaagacgatcaagtctctgagggtacttcgagttctgcgaccactgaaaaccatcaagcgcttgcccaaactgaaggctgtgtttgactgcgtggtgacctccttgaagaatgtcttcaacatactcattgtctacaagctctttatgttcatctttgccgtcattgctgttcagttattcaagggaaagttcttttattgcaccgacagttccaaggacacagagaaggaatgcataggcaactatgtagaccacgagaaaaacaagatggaggtgaagggccgggagtggaagcgtcatgaattccactatgacaacatcatctgggccctgctgaccctcttcaccgtctccacgggggaaggatggcctcaggttctgcagcactcggtagatgtgacagaggaggacagaggcccaagccgcagcaaccgcatggagatgtccatcttctatgtggtctactttgtggtcttccctttcttctttgtcaatatcttcgtggccctcattatcatcaccttccaggagcaaggggacaagatgatggaggagtgtagcctagaaaagaatgagcgggcatgcatcgacttcgccattagtgccaaacctctcacccgctacatgccacagaacaggcacaccttccagtaccgcgtgtggcacttcgtagtctcgccatcctttgagtataccatcatggccatgattgccttgaacaccgttgtgctgatgatgaagtactattctgctccttggacctatgagctcgccctaaagtacctgaacatcgccttcactatggtgttttccctagaatgtgtcctaaaggtcatcgctttcggcttcttgaactatttccgagatacctggaacatctttgacttcattaccgtgatcggcagtatcacagaaattatcctgacagacagcaagctggtgaacaccagtggcttcaatatgagctttctgaagctcttccgagctgcacggctcataaagcttctgcgacagggctacaccatccgcatcttactgtggaccttcgtgcagtcctttaaggctctcccctatgtctgccttctgattgccatgcttttcttcatctacgctatcattgggatgcaggtgtttggaaacataaagttagatgaggagagtcatatcaaccggcacaacaactttcggagtttcttcgggtctctcatgctgcttttcaggagcgccacaggggaggcttggcaggagattatgttgtcatgtctgggcgagaagggctgtgagcctgacaccactgcaccctcagggcagaacgagagtgagcgctgtggcactgacctggcctacgtttattttgtctccttcatcttcttctgctccttcctgatgctcaacctgtttgtggctgttatcatggacaactttgagtacctgactcgagattcgtccatcctggggcctcaccacttggatgaatttgtccgtgtctgggcagagtatgacagagcagcatgtggccgcatccattacactgagatgtatgaaatgctgactctcatgtcaccaccgctaggcctcggcaagagatgtccctccaaagtggcctataagaggttggtcctgatgaatatgccagtggctgaggacatgacagtccatttcacctccacacttatggctctgatccggacagctctggacattaaaatcgccaaaggtggtgcagacagacagcagctagactcagagctacaaaaagagacgctggccatttggcctcacctgtcccaaaagatgttggatctgctagtgcccatgcccaaagcctctgacctgactgtgggcaagatctatgcagcaatgatgattatggactactataaacagagtaaggtaaagaaacagagacagcagctggaagaacagaaaaatgcacccatgttccagcgcatggagccctcctcactgcctcaggagatcatttctaatgccaaagccctgccttatctccagcaggaccctgtttctggcctgagtggtcggagtggatacccttcaatgagtccactctcccctcaagaaatattccagttggcttgtatggacccagcggatgatggacaattccaggaacagcaatcgctggtggtaacagaccctagctctatgcgacgttcattttctacaattcgggataagcgttcaaattcctcctggttggaggagttctccatggaacgtagcagtgaaaacacctacaagtcacgacgcagaagttaccattcctccctgaggctgtcagcccaccgcctgaattctgactctggtcacaagtctgacactcaccgctcaggaggcagggagagaggccgatccaaagaacgaaagcatctcctctctccggatgtctcccgctgcaattctgaggagcgaggaacccaggctgactgggagtccccagaacgtcgccagtccaggtcacccagtgagggaaggtcacaaacccccaacagacagggtacaggttcactgagtgagagctccattccctctatctccgacaccagcaccccaagacgaagtcgtcgccagctcccacctgtgccaccaaagcctcggcccctcctctcctacagctccctgatgagacacactggcggcatctctccacctcctgatggaagtgagggtggatccccactggcctctcaagctctggaaagcaacagcgcttgcctaaccgagtcttccaactccttgcacccccagcagggccagcacccttccccacagcactacatctctgagccctatctggccctccatgaagactcccacgcctcagactgtggcgaggaggagacactcacctttgaggcagctgtagctactagcttgggccggtccaataccattggctctgccccacccctacggcacagctggcagatgcctaatgggcactatcggcggcggaggctggggggcctgggcctggccatgatgtgtggagctgtcagtgacctcctgagtgacacggaagaagacgataagtgctagaggctgccatcccctccgatgcatgctcttctctcacagggagaaaaccaagaccaaattgggaagccagtgcggcccgggggggaggaagagggagaaggaagatggagaaaggacaggacgccatgcatcctcagaagagaggaagtaaaagacagatggaaaaaccagtcaaacccaccaaattgcatcatttccctttgcaagatgggcactgccatagtcctgcctctttgctggggaaagaaaatacaggaatgtgggggtttattcccatgggagaagggacatgaaggtggcttggcttccgttgcccttccactttcatagctgcacaggatctgctgacctgtgtctaagctcattgccctgagcagctgggaagacttcccagcaccttagtgagggaagagttgaaatagcaggagaagaatctcctcaccagctcttgcattttggctg

SEQ ID NO: 12686 - protein, 2222 aa, Rattus norvegicus
  ref <308>: DATABASE ACCESSION NUMBER: SWISS-Prot / AAA40855
  ref <309>: DATABASE ENTRY DATE: 2002-06-15
MALYNPIPVRQNCFTVNRSLFIFGEDNIVRKYAKKLIDWPPFEYMILATIIANCIVLALEQHLPEDDKTPMSRRLEKTEPYFIGIFCFEAGIKIVALGFIFHKGSYLRNGWNVMDFIVVLSGILATAGTHFNTHVDLRTLRAVRVLRPLKLVSGIPSLQIVLKSIMKAMVPLLQIGLLLFFAILMFAIIGLEFYSGKLHRACFMNNSGILEGFDPPHPCGVQGCPAGYECKDWIGPNDGITQFDNILFAVLTVFQCITMEGWTTVLYNTNDALGATWNWLYFIPLIIIGSFFVLNLVLGVLSGEFAKERERVENRRAFMKLRRQQQIERELNGYRAWIDKAEEVMLAEENKNSGTSALEVLRRATIKRSRTEAMTRDSSDEHCVDISSVGTPLARASIKSTKVDGASYFRHKERLLRISIRHMVKSQVFYWIVLSVVALNTACVAIVHHNQPQWLTHLLYYAEFLFLGLFLLEMSLKMYGMGPRLYFHSSFNCFDFGVTVGSIFEVVWAIFRPGTSFGISVLRALRLLRIFKITKYWASLRNLVVSLMSSMKSIISLLFLLFLFIVVFALLGMQLFGGRFNFNDGTPSANFDTFPAAIMTVFQILTGEDWNEVMYNGIRSQGGVSSGMWSAIYFIVLTLFGNYTLLNVFLAIAVDNLANAQELTKDEQEEEEAFNQKHALQKAKEVSPMSAPNMPSIERDRRRRHHMSMWEPRSSHLRERRRRHHMSVWEQRTSQLRRHMQMSSQEALNKEEAPPMNPLNPLNPLSPLNPLNAHPSLYRRPRPIEGLALGLGLEKCEEERISRGGSLKGDIGGLTSVLDNQRSPLSLGKREPPWLPRSCHGNCDPTQQETGGGETVVTFEDRARHRQSQRRSRHRRVRTEGKESASASRSRSASQERSLDEGVSIDGEKEHEPQSSHRSKEPTIHEEERTQDLRRTNSLMVPRGSGLVGALDEAETPLVQPQPELEVGKDAALTEQEAEGSSEQALLADVQLDVGRGISQSEPDLSCMTTNMDKATTESTSVTVAIPDVDPLVDSTVVNISNKTDGEASPLKEAETKEEEEEVEKKKQKKEKRETGKAMVPHSSMFIFSTTNPIRKACHYIVNLRYFEMCILLVIAASSIALAAEDPVLTNSERNKVLRYFDYVFTGVFTFEMVIKMIDQGLILQDGSYFRDLWNILDFVVVVGALVAFALANALGTNKGRDIKTIKSLRVLRVLRPLKTIKRLPKLKAVFDCVVTSLKNVFNILIVYKLFMFIFAVIAVQLFKGKFFYCTDSSKDTEKECIGNYVDHEKNKMEVKGREWKRHEFHYDNIIWALLTLFTVSTGEGWPQVLQHSVDVTEEDRGPSRSNRMEMSIFYVVYFVVFPFFFVNIFVALIIITFQEQGDKMMEECSLEKNERACIDFAISAKPLTRYMPQNRHTFQYRVWHFVVSPSFEYTIMAMIALNTVVLMMKYYSAPWTYELALKYLNIAFTMVFSLECVLKVIAFGFLNYFRDTWNIFDFITVIGSITEIILTDSKLVNTSGFNMSFLKLFRAARLIKLLRQGYTIRILLWTFVQSFKALPYVCLLIAMLFFIYAIIGMQVFGNIKLDEESHINRHNNFRSFFGSLMLLFRSATGEAWQEIMLSCLGEKGCEPDTTAPSGQNESERCGTDLAYVYFVSFIFFCSFLMLNLFVAVIMDNFEYLTRDSSILGPHHLDEFVRVWAEYDRAACGRIHYTEMYEMLTLMSPPLGLGKRCPSKVAYKRLVLMNMPVAEDMTVHFTSTLMALIRTALDIKIAKGGADRQQLDSELQKETLAIWPHLSQKMLDLLVPMPKASDLTVGKIYAAMMIMDYYKQSKVKKQRQQLEEQKNAPMFQRMEPSSLPQEIISNAKALPYLQQDPVSGLSGRSGYPSMSPLSPQEIFQLACMDPADDGQFQEQQSLVVTDPSSMRRSFSTIRDKRSNSSWLEEFSMERSSENTYKSRRRSYHSSLRLSAHRLNSDSGHKSDTHRSGGRERGRSKERKHLLSPDVSRCNSEERGTQADWESPERRQSRSPSEGRSQTPNRQGTGSLSESSIPSISDTSTPRRSRRQLPPVPPKPRPLLSYSSLMRHTGGISPPPDGSEGGSPLASQALESNSACLTESSNSLHPQQGQHPSPQHYISEPYLALHEDSHASDCGEEETLTFEAAVATSLGRSNTIGSAPPLRHSWQMPNGHYRRRRLGGLGLAMMCGAVSDLLSDTEEDDKC

SEQ ID NO: 12687 - DNA, 831 bp, Rattus norvegicus; identical to SEQ ID NO: 2956
  ref <308>: DATABASE ACCESSION NUMBER: EMBL / L17127
  ref <309>: DATABASE ENTRY DATE: 2000-03-04

SEQ ID NO: 12688 - protein, 263 aa, Rattus norvegicus; identical to SEQ ID NO: 2957
  ref <308>: DATABASE ACCESSION NUMBER: SWISS-Prot / AAA42054
  ref <309>: DATABASE ENTRY DATE: 2002-06-15

SEQ ID NO: 12689 - DNA, 974 bp, Homo sapiens; identical to SEQ ID NO: 2958
  ref <308>: DATABASE ACCESSION NUMBER: EMBL / BC008314
  ref <309>: DATABASE ENTRY DATE: 2001-07-13

SEQ ID NO: 12690 - protein, 264 aa, Homo sapiens [sequence omitted]

SEQ ID NO: 12691 - DNA, 831 bp, Rattus norvegicus; identical to SEQ ID NO: 2956
  ref <308>: DATABASE ACCESSION NUMBER: EMBL / L17127
  ref <309>: DATABASE ENTRY DATE: 2000-03-04

SEQ ID NO: 12692 - protein, 263 aa, Rattus norvegicus; identical to SEQ ID NO: 2957
  ref <308>: DATABASE ACCESSION NUMBER: SWISS-Prot / AAA42054
  ref <309>: DATABASE ENTRY DATE: 2002-06-15

SEQ ID NO: 12693 - DNA, 974 bp, Homo sapiens; identical to SEQ ID NO: 2958
  ref <308>: DATABASE ACCESSION NUMBER: EMBL / BC008314
  ref <309>: DATABASE ENTRY DATE: 2001-07-13

SEQ ID NO: 12694 - protein, 264 aa, Homo sapiens [sequence omitted]

SEQ ID NO: 12695 - DNA, 1062 bp, Rattus norvegicus; identical to SEQ ID NO: 2971
  ref <308>: DATABASE ACCESSION NUMBER: EMBL / L19112
  ref <309>: DATABASE ENTRY DATE: 2001-02-13

SEQ ID NO: 12696 - DNA, 2650 bp, Homo sapiens
  ref <308>: DATABASE ACCESSION NUMBER: EMBL / X56191
  ref <309>: DATABASE ENTRY DATE: 1997-02-17
ggaccggggattggtaccgtaaccatggtcagctggggtcgtttcatctgcctggtcgtggtcaccatggcaaccttgtccctggcccggccctccttcagtttagttgaggataccacattagagccagaagagccaccaaccaaataccaaatctctcaaccagaagtgtacgtggctgcgccaggggagtcgctagaggtgcgctgcctgttgaaagatgccgccgtgatcagttggactaaggatggggtgcacttggggcccaacaataggacagtgcttattggggagtacttgcagataaagggcgccacgcctagagactccggcctctatgcttgtactgccagtaggactgtagacagtgaaacttggtacttcatggtgaatgtcacagatgccatctcatccggagatgatgaggatgacaccgatggtgcggaagattttgtcagtgagaacagtaacaacaagagagcaccatactggaccaacacagaaaagatggaaaagcggctccatgctgtgcctgcggccaacactgtcaagtttcgctgcccagccggggggaacccaatgccaaccatgcggtggctgaaaaacgggaaggagtttaagcaggagcatcgcattggaggctacaaggtacgaaaccagcactggagcctcattatggaaagtgtggtcccatctgacaagggaaattatacctgtgtggtggagaatgaatacgggtccatcaatcacacgtaccacctggatgttgtggagcgatcgcctcaccggcccatcctccaagccggactgccggcaaatgcctccacagtggtcggaggagacgtagagtttgtctgcaaggtttacagtgatgcccagccccacatccagtggatcaagcacgtggaaaagaacggcagtaaatacgggcccgacgggctgccctacctcaaggttctcaagcactcggggataaatagttccaatgcagaagtgctggctctgttcaatgtgaccgaggcggatgcgggggaatatatatgtaaggtctccaattatatagggcaggccaaccagtctgcctggctcactgtcctgccaaaacagcaagcgcctggaagagaaaaggagattacagcttccccagactacctggagatagccatttactgcataggggtcttcttaatcgcctgtatggtggtaacagtcatcctgtgccgaatgaagaacacgaccaagaagccagacttcagcagccagccggctgtgcacaagctgaccaaacgtatccccctgcggagacaggtaacagtttcggctgagtccagctcctccatgaactccaacaccccgctggtgaggataacaacacgcctctcttcaacggcagacacccccatgctggcaggggtctccgagtatgaacttccagaggacccaaaatgggagtttccaagagataagctgacactgggcaagcccctgggagaaggttgctttgggcaagtggtcatggcggaagcagtgggaattgacaaagacaagcccaaggaggcggtcaccgtggccgtgaagatgttgaaagatgatgccacagagaaagacctttctgatctggtgtcagagatggagatgatgaagatgattgggaaacacaagaatatcataaatcttcttggagcctgcacacaggatgggcctctctatgtcatagttgagtatgcctctaaaggcaacctccgagaatacctccgagcccggaggccacccgggatggagtactcctatgacattaaccgtgttcctgaggagcagatgaccttcaaggacttggtgtcatgcacctaccagctggccagaggcatggagtacttggcttcccaaaaatgtattcatcgagatttagcagccagaaatgttttggtaacagaaaacaatgtgatgaaaatagcagactttggactcgccagagatatcaacaatatagactattacaaaaagaccaccaatgggcggcttccagtcaagtggatggctccagaagccctgtttgatagagtatacactcatcagagtgatgtctggtccttcggggtgttaatgtgggagatcttcactttagggggctcgccctacccagggattcccgtggaggaactttttaagctgctgaaggaaggacacagaatggataagccagccaactgcaccaacgaactgtacatgatgatgagggactgttggcatgcagtgccctcccagagaccaacgttcaagcagttggtagaagacttggatcgaattctcactctcacaaccaatgagatctgaaagtttatggcttcattgagaaactgggaaaagttggtcaggcgcagtggctcatgcctgtaatcccagcactttgggaggccgaggcaggcggatcatgaggtcaggagttccagaccagcctggccaacatggtgaaaccctgtctctactaaagatacaaaaaattagccgggcgtgttggtgtgcgcctgtaatcccagctactccgggaggctgaggcaggagagtcacttgaaccggggaggcggaggttacagtgagccgagatcatgccattgcattccagccttggcgacagagcgagactccatct

SEQ ID NO: 12697 - protein, 654 aa, Homo sapiens
  ref <308>: DATABASE ACCESSION NUMBER: SWISS-Prot / Q01742
  ref <309>: DATABASE ENTRY DATE: 2002-06-15
MVSWGRFICLVVVTMATLSLARPSFSLVEDTTLEPEGAPYWTNTEKMEKRLHAVPAANTVKFRCPAGGNPMPTMRWLKNGKEFKQEHRIGGYKVRNQHWSLIMESVVPSDKGNYTCVVENEYGSINHTYHLDVVERSPHRPILQAGLPANASTVVGGDVEFVCKVYSDAQPHIQWIKHVEKNGSKYGPDGLPYLKVLKHSGINSSNAEVLALFNVTEADAGEYICKVSNYIGQANQSAWLTVLPKQQAPGREKEITASPDYLEIAIYCIGVFLIACMVVTVILCRMKNTTKKPDFSSQPAVHKLTKRIPLRRQVTVSAESSSSMNSNTPLVRITTRLSSTADTPMLAGVSEYELPEDPKWEFPRDKLTLGKPLGEGCFGQVVMAEAVGIDKDKPKEAVTVAVKMLKDDATEKDLSDLVSEMEMMKMIGKHKNIINLLGACTQDGPLYVIVEYASKGNLREYLRARRPPGMEYSYDINRVPEEQMTFKDLVSCTYQLARGMEYLASQKCIHRDLAARNVLVTENNVMKIADFGLARDINNIDYYKKTTNGRLPVKWMAPEALFDRVYTHQSDVWSFGVLMWEIFTLGGSPYPGIPVEELFKLLKEGHRMDKPANCTNELYMMMRDCWHAVPSQRPTFKQLVEDLDRILTLTTNEI

SEQ ID NO: 12698 - DNA, 5412 bp, Rattus norvegicus; identical to SEQ ID NO: 2974
  ref <308>: DATABASE ACCESSION NUMBER: EMBL / L19180
  ref <309>: DATABASE ENTRY DATE: 2000-03-04

SEQ ID NO: 12699 - protein, 1496 aa, Rattus norvegicus; identical to SEQ ID NO: 2975
  misc_feature (1)..(1496): Xaa=Unknown amino acid

SEQ ID NO: 12700 - DNA, 6363 bp, Homo sapiens; identical to SEQ ID NO: 2976
  ref <308>: DATABASE ACCESSION NUMBER: EMBL / U35234
  ref <309>: DATABASE ENTRY DATE: 1999-06-30

SEQ ID NO: 12701 - protein, 1949 aa, Homo sapiens; identical to SEQ ID NO: 2977
  misc_feature (1)..(1949): Xaa=Unknown amino acid

SEQ ID NO: 12702 - DNA, 5412 bp, Rattus norvegicus; identical to SEQ ID NO: 2974
  ref <308>: DATABASE ACCESSION NUMBER: EMBL / L19180
  ref <309>: DATABASE ENTRY DATE: 2000-03-04

SEQ ID NO: 12703 - protein, 1496 aa, Rattus norvegicus; identical to SEQ ID NO: 2975
  misc_feature (1)..(1496): Xaa=Unknown amino acid

SEQ ID NO: 12704 - DNA, 6363 bp, Homo sapiens; identical to SEQ ID NO: 2976
  ref <308>: DATABASE ACCESSION NUMBER: EMBL / U35234
  ref <309>: DATABASE ENTRY DATE: 1999-06-30

SEQ ID NO: 12705 - protein, 1949 aa, Homo sapiens; identical to SEQ ID NO: 2977
  misc_feature (1)..(1949): Xaa=Unknown amino acid

SEQ ID NO: 12706 - DNA, 911 bp, Rattus norvegicus
  ref <308>: DATABASE ACCESSION NUMBER: EMBL / L20823
  ref <309>: DATABASE ENTRY DATE: 2000-03-04
atgcgggaccggctgccggacctcacggcgtgtaggaaaagcgacgatggagacaatgctgtcatcatcacggtggagaaggaccacttcatggatgccttcttccatcaggtggaggagattcgaagcagcatagccaggattgctcagcacgtggaggatgtgaagaagaaccacagcatcatcctctctgccccaaacccagaaggaaaaataaaagaagagctggaggacctgaacaaagagatcaagaaaactgctaacaggatccggggcaagctgaaggctattgagcagagttgtgatcaggacgagaatgggaaccgaacttcagtggatctgcggatacgaaggacccagcactcagtgctgtcacggaagtttgtggacgtcatgacagaatacaatgaagcacagatcctgtttcgggagcgaagcaaaggccgaatccagcgccagctagagatcactgggaggaccaccactgacgaggagctggaggagatgctggagagcgggaagccgtccatcttcatctcggacattatatcagattcacagattactaggcaagctctcaatgagatcgagtcacgccacaaagacatcatgaagctggagaccagcatccgagagctgcacgagatgttcatggatatggccatgtttgtcgagactcagggtgaaatggtcaacaacattgagagaaacgtggtgaactccgtagattacgtggagcacgccaaggaagagactaagaaagccatcaaataccagagcaaggccagacggaaaaagtggataattgctgctgtggtggtggctgtcattgctgtcctggctctaatcattggcttgacggttggcaaatgattgcgtagatggcgctgggtgcttgcctctccctcagg

SEQ ID NO: 12707 - protein, 290 aa, Rattus norvegicus
  ref <308>: DATABASE ACCESSION NUMBER: SWISS-Prot / AAA03044
  ref <309>: DATABASE ENTRY DATE: 2002-06-15
MRDRLPDLTACRKSDDGDNAVIITVEKDHFMDAFFHQVEEIRSSIARIAQHVEDVKKNHSIILSAPNPEGKIKEELEDLNKEIKKTANRIRGKLKAIEQSCDQDENGNRTSVDLRIRRTQHSVLSRKFVDVMTEYNEAQILFRERSKGRIQRQLEITGRTTTDEELEEMLESGKPSIFISDIISDSQITRQALNEIESRHKDIMKLETSIRELHEMFMDMAMFVETQGEMVNNIERNVVNSVDYVEHAKEETKKAIKYQSKARRKKWIIAAVVVAVIAVLALIIGLTVGK

SEQ ID NO: 12708 - DNA, 1109 bp, Homo sapiens
  ref <308>: DATABASE ACCESSION NUMBER: Refseq / NM_001980
  ref <309>: DATABASE ENTRY DATE: 2000-10-31
gcggggcctgaggcggagaccggagagcccgcggcccggccggaggcagctcgggacaggcttgagcggcggggcgcgctgcccggccggcggggatgcgggaccggctgccagacctgacggcgtgtaggaagaatgatgatggagacacagttgttgtggttgagaaagatcatttcatggatgatttcttccatcaggtggaggagattagaaacagtattgataaaataactcaatatgttgaagaagtaaagaaaaaccacagcatcattctttctgcaccaaacccggaaggaaaaataaaagaagagcttgaagatctgaacaaagaaatcaagaaaactgcgaataaaattgcagccaagttaaaggctattgaacaaagttttgatcaggatgagagtgggaaccggacttcagtggatcttcggatacgaagaacccagcattcggtgctgtctcggaagtttgtggaagccatggcggagtacaatgaggcacagactctgtttcgggagcggagcaaaggccgcatccagcgccagctggagataactgggagaaccaccacagacgacgagctagaagagatgctggagagcgggaagccatccatcttcacttccgacattatatcagattcacaaattactagacaagctctcaatgaaatcgagtcacgtcacaaggacatcatgaagctggagaccagcatccgagagttgcatgagatgttcatggacatggctatgtttgtggagactcagggtgaaatgatcaacaacatagaaagaaatgttatgaatgccacagactatgtagaacacgctaaagaagaaacaaaaaaagctatcaaatatcagagcaaggcaagaaggaaaaagtggataattattgctgtgtcagtggttctggttgtctatcgtctatttggcttgtcgttggaatatgttgtacgcagtgctgcctctctgccagggtggggaaattgatgttcattatattgaagtttgtttattgattctcacacatcaaaccaccaagattcctgctgcaatgaaccaaatcagcatcctgtcatttcgtgaatgaatctcagacgctgt

SEQ ID NO: 12709 - protein, 299 aa, Homo sapiens [sequence omitted]

SEQ ID NO: 12710 - DNA, 959 bp, Rattus norvegicus
  ref <308>: DATABASE ACCESSION NUMBER: EMBL / L22655
  ref <309>: DATABASE ENTRY DATE: 2000-03-04
aatttcatatcctcaaaatgatgagtcctgcccagttcctgtttctgctaatgctctggattcaggaaaccagtggtgatgttgtgatgacccagactccagtgtctttgtcagttgccattggacaaccagcctccatatcttgcaagtcaagtcagagcctcgtaggtactaatggaaagacatatttgaattggttattacagaggcccggccagtctccaaagcgactaatctatctggtgtccaaactggactctgggattcctgataggttcagtggcagtggatcagagacagattttactcttaaaatcagcagagtggaggctgatgatttgggagtttattactgcttgcaaggtacacattttccgctcacgttcggttctgggaccaagctggagatcaaacgggctgatgctgcaccaactgtatctatcttcccaccatccacggaacagttagcaactggaggtgcctcagtcgtgtgcctcatgaacaacttctatcccagagacatcagtgtcaagtggaagattgatggcactgaacgacgagatggtgtcctggacagtgttactgatcaggacagcaaagacagcacgtacagcatgagcagcaccctctcgttgaccaaggctgactatgaaagtcataacctctatacctgtgaggttgttcataagacatcatcctcacccgtcgtcaagagcttcaacaggaatgagtgttagacccaaaggtcctgaggtgccacctgctccccagctccttccaatcttccctcctaaggtcttggagacttccccacaagcgacctaccactgttgcggtgctccaaacctcctccccacctcatcctccttcctttccttggctttgatcatgctaatatttggggaatattaaataaagtgaatctttgcacttgaaaaaaaaaaaaaaaaaaaaaaaaa

SEQ ID NO: 12711 - protein, 239 aa, Rattus norvegicus
  misc_feature (1)..(239): Xaa=Unknown amino acid
MSPAQFLFLLMLWIQETSGDVVMTQTPVSLSVAIGQPASISCKSSQSLVGTNGKTYLNWLLQRPGQSPKRLIYLVSKLDSGIPDRFSGSGSETDFTLKISRVEADDLGVYYCLQGTHFPLTFGSGTKLEIKRADAAPTVSIFPPSTEQLATGGASVVCLMNNFYPRDISVKWKIDGTERRDGVLDSVTDQDSKDSTYSMSSTLSLTKADYESHNLYTCEVVHKTSSSPVVKSFNRNECX

SEQ ID NO: 12712 - DNA, 660 bp, Homo sapiens
  ref <308>: DATABASE ACCESSION NUMBER: EMBL / AB022653
  ref <309>: DATABASE ENTRY DATE: 2002-03-27
gacatccagatgacccaatctccagactccctggctgtgtctctgggcgagagggccaccgtcaactgcaagtccagccagagtattttatacagttccaatagtaagaattacttagcttggtaccagcagaaaccaggacagcctcctacactgctcatttactgggcatctacccggcaatccggggtccctgaccgattcagtggcagcgggtctgggacaaatttcactctcaccatcagcaacctgcagactgaagatgtggcagtttattactgtcagcaatattatactgctcccttcactttcggccctgggaccacagtgcatatcaaacgaactgtggctgcaccatctgtcttcatcttcccgccatctgatgagcagttgaaatctggaactgcctctgttgtgtgcctgctgaataacttctatcccagagaggccaaagtacagtggaaggtggataacgccctccaatcgggtaactcccaggagagtgtcacagagcaggacagcaaggacagcacctacagcctcagcagcaccctgacgctgagcaaagcagactacgagaaacacaaagtctacgcctgcgaagtcacccatcagggcctgagctcgcccgtcacaaagagcttcaacaggggagagtgt

SEQ ID NO: 12713 - DNA, 3185 bp, Rattus norvegicus
  ref <308>: DATABASE ACCESSION NUMBER: EMBL / L23088
  ref <309>: DATABASE ENTRY DATE: 2000-03-04
gacgggtcaagagaggacatggccggctgcccaaaaggttcttggaagccaagactccggagtgtagtcctgggagcagctcagcttatctggctcagtgctttgatctctgagcttgtaaatcgaaagaaagtggcgacgtggacctataactacagcacgaaagcatactcatggaataactcacgggcattctgcaagaggcacttcacagacttagtggccatccagaacaagaatgaaatcgctcacctcaatgacgtcatcccatacgtcaactcttactactggattggtatccgaaagatcaacaataagtggacctgggtgggaaccaataagactctcacggcggaggctgagaactgggcagacaacgagcccaataacaagaggaacaaccaggactgtgtggagatctacatcaagagtaattcggcccctggcaagtggaatgatgagccctgctttaaacgaaagcgggccctgtgctacacagcctcctgccaggacatgtcttgcaacagccaaggggagcgcatcgagaccattgggagctacacctgctcctgctacccgggcttctatgggccagagtgtgaatacgtccaagagtgtggaaaattcgacatcccgcaacacgttctcatgaactgcagccaccctctgggggacttctccttcagctcacagtgcaccttcagctgtcctgagggctatgacctgaacggacccagtgagatgcaatgtttggcctctggaatctggacaaataatcccccgcagtgtaaagctgtgcagtgccagagcctggaagcccctctccatggaaccatggactgtacacacccattggctgcctttgcctatgactccagctgtaaatttgagtgccagcctggatatcggatgaggggctctgacatactccactgcactgactctggtcagtggagtgaaccattgccaacctgtgaagccattgcatgcgaaccgctggagagccccctccatgggagcatggactgcttcccatccacaggagcattcgggtacaacagcagctgcacttttcgctgcacagagggattcgtgctgatgggaaatgatgccattcattgtgctgacttggggcagtggacagccccagccccagtctgtgaagcgttgcaatgtcaggagtttccggtcccaagtaaagcccaggtgagctgctcggaccccttcggacccttgaagtaccagtcagcctgcagcttttcctgtgatgaaggctcactcttggtgggagcaagtgtgataagatgcttggctactggacactggagtgaggcccctcctgaatgtcaagctgtctcctgcacccctttgctcagccctgagaatggaaccatgacgtgtatccagcctcttgggcattccaactacaaatccacatgccagttcatgtgtgacgaaggattttatctatctggaccagaaagattggactgttctccatctggacactggacaggcagccctccaatgtgtgaagccatcaagtgcccagaaatctttgccccagaacaaggcagcttggactgctctcatgttcatggagaattcagtgtcggctccacctgtcacttctcctgcaacgaggagtttgagctcctgggatctcgaaatgtggagtgcacagtgtctggaagatggtcagcgcctccaccaacctgcaaaggtgtaacatcacttcctgtcccatcggttcgatgccccgccctcactactcctggacagggcacaatgtcctgtcgacaccacctggaaagctttggtccgaacaccacttgttactttgggtgcaaaacaggatttacactcagaggagccaactctctccgctgcggggcttcaggacaatggacagcagtgacgcccgtgtgcagagccgtcaaatgctcagaattgcacatggacacagcagtcgcgatgaactgttccaacccctggggaaactttagctacggatcaacctgtgccttccactgtccagaggggcagtcactgaatggctctgccaggacaacctgcggagaggacggtcactggtcagatgctatgccaacctgccaagcagggacgctgacgatccaggaagctctgacttacttgggtggcgccttggcttctacttctggcctggcagtgggcgggacgctactggctctgctaagaaagcgtctcagaaagaaagatgatggaaaatgccccctgaaccctcacagccacctaggaacatatggagtcttcacgaacgctgcatatgacccaaccccttaagaggcctggctcccgatgtcaattggatctctcaggattccgcatgcagataacaagtttcctggtcgacttgactgtcactccccagcatttgctgcggttctttgtggtaaataattggacaggaaccaaacgaaaggacgatgtgctccgcccaccccttcctgctccgcccctcaccttcctcgggctcagccacagaaacaggagcaaatgtttctgctgtggtctgtggcttgatgttactttgctgttactgaaaacccgagttagtccaaggcactggagcatctgcctcaccaggtgaccaggctgtggaaaaccggaagtctgtctgctttctcttgggattgaagaatggcgatgttggttgggcaggcagacctctcgtttaagggaacgctgctttaagatctctgggtcttcgtgtttcttatctctgaggttgtttacacctctgctgctgagactttcagatggtactagggggacacagaagatctgtgaacagagcattggacaccacatctgactgcagacttttcgtcacaaagcacccattggccattgtttgactgtagagtttaactcccagctatcaagctcttcacgtttgttcagtgaggtctgtgtatctcactttgtcctaccaccaatgtggtcacagttatactcctccaaatgacagctggaccctcccagtgagcccacaaatatatgttgtatgtcgcctgtccacagagagaaaaatcagaggagcagggaaggtcctcctttcggtattttggaccgcaggaaaggacagttatgttttaaacgtaacctaattcacatatttaataaacaagtcactgaaaatt

SEQ ID NO: 12714 - protein, 768 aa, Rattus norvegicus
  ref <308>: DATABASE ACCESSION NUMBER: SWISS-Prot / AAA60325
  ref <309>: DATABASE ENTRY DATE: 2002-06-15
MAGCPKGSWKPRLRSVVLGAAQLIWLSALISELVNRKKVATWTYNYSTKAYSWNNSRAFCKRHFTDLVAIQNKNEIAHLNDVIPYVNSYYWIGIRKINNKWTWVGTNKTLTAEAENWADNEPNNKRNNQDCVEIYIKSNSAPGKWNDEPCFKRKRALCYTASCQDMSCNSQGERIETIGSYTCSCYPGFYGPECEYVQECGKFDIPQHVLMNCSHPLGDFSFSSQCTFSCPEGYDLNGPSEMQCLASGIWTNNPPQCKAVQCQSLEAPLHGTMDCTHPLAAFAYDSSCKFECQPGYRMRGSDILHCTDSGQWSEPLPTCEAIACEPLESPLHGSMDCFPSTGAFGYNSSCTFRCTEGFVLMGNDAIHCADLGQWTAPAPVCEALQCQEFPVPSKAQVSCSDPFGPLKYQSACSFSCDEGSLLVGASVIRCLATGHWSEAPPECQAVSCTPLLSPENGTMTCIQPLGHSNYKSTCQFMCDEGFYLSGPERLDCSPSGHWTGSPPMCEAIKCPEIFAPEQGSLDCSHVHGEFSVGSTCHFSCNEEFELLGSRNVECTVSGRWSAPPPTCKGVTSLPVPSVRCPALTTPGQGTMSCRHHLESFGPNTTCYFGCKTGFTLRGANSLRCGASGQWTAVTPVCRAVKCSELHMDTAVAMNCSNPWGNFSYGSTCAFHCPEGQSLNGSARTTCGEDGHWSDAMPTCQAGTLTIQEALTYLGGALASTSGLAVGGTLLALLRKRLRKKDDGKCPLNPHSHLGTYGVFTNAAYDPTP

SEQ ID NO: 12715 - DNA, 31737 bp, Homo sapiens
  ref <308>: DATABASE ACCESSION NUMBER: EMBL / AL022146
  ref <309>: DATABASE ENTRY DATE: 1999-11-23
atataattgtatgaagactgttcaccatcattgctgtgtctgtgtgtgcatttatatacttatttatatatcaaatgcataataggtaaaaattttgatcagatatgctttttcaacacatagaagttaaaaacagctatgcactgatgtgaagcttttctttttccaactttctaacttcccaaaaagtctcctaaatgagttaggcaaggaaacttttcgctatagaaaagaagatgttggattcctgttaattctagtttgtttagatttttccacagtgggaggtgttaacaggggaagaagtacaatgctgcctgggaaagcctgccactgtttatcatccaagtatgtcaggtcaatctaactgatttcctgtgcttgaagacaggaaaagacgttgctgcctggctgctcctgccctcggtttcaaaccaaagctggggtcaggcccaattgtgaagtggtttaaattggtctctagtgccaccccattctcctttctataccatcagataccctccccctattgctcactaaggagcttgtgattatagccttcctcttcatcagtagataacataccacctaaaagtgatgttttttaaaaaaattacactttaagttctgtgatacatgtgcagaacgtgtaggtttgttaaataggtatacacatgccatggtggtttgctgcacccatcaacctatcatctacattaggtgtttctcctaatgctatccctcccctagctctccaccccgcaacaggccctggtgtatgatgttcccctccctgtgtccatgtgttctcattattcaactcccacttatgagtgagaacatgcggtgtttagttttccgttcctgtgttagtttgctgagaatgatggtttccagcttcatccaagtccctgaaaaggacatgaactcatcattttttatggctgcatagtattccatggtgtatatgtgccacattttctttatccagtctatcattgatgggtatttgggttggttccaagtctttgctgctgtgaacagtgctgcaataaacatatgtgtgcatgtgtctatagtagaatgatttataatcctttgggtacatacctagtaatgggattgctgggtcaaatggtatttctggttctagatccttgaggaatcgccacactgtcttccacagtggttgaactaatttacactcccaccaacagtgtaaaagcattcctatttctccacatcctctccagcatctgttgtttcctgactgtttaatgatcaccattctaactggcatgagatggtatctcattgtggttttgatttgcatttctctaatgaccagtgatgatgagcttcttttcatacatttgttgtccacataaatgtcttcttttgagaattgtctgttcatatcctttgtccactttttgatggggttgattttttcttgtaaattttttgaagttccttgtagattctggatattagccctatgtcagatggatagattgcaaaactttctcccactctgtaggtttcctgttcactctgatgatagtttcttttgttctgcagaagctctttagtttaattatatcaaatttgtcaattttggcttttgttgccactgagtttggtgttttagtcatgaagtctttgcccatgcctatgtcctgaatggtattgcctaggttttcttctagggcttttatagttttaggtctcacatttaagtctttaatccatcttgagttaatttttgtataaggtgtaaggaagggatccagtttcagttttctgcatatggctagccagttttcccaacaccatttattaaacagggaatcctttctgcatttcttgtttttgtcaggtttgtcaaagatcagatggttgtagatgtgtggtattatttctgagggctctgttctgttccattggtctatatatctgtcttggtactgtgtccggaattggtgggttcttggtctcactgacttcaagaatgaagccgcggaccctcgcggtgagtgttacagttcttaaaggtggtgtgtccggagttcgttccttctgatgttcggatgtgttcagccttctggtgggttcgtggtctcgctggctcaggagtgaagctgcaaaccttctcggtgagtgttacagctcttaaggtggcccatctggagttgtttgttcctcccagtgggttcgtagtcttgctggcttcaagagtgaagctgcagaccttcgcagtgagtgttacagctcataaaggcagtgtggacccaaagagtgagcagcagcaagatttattgcaaacagtgaaagaacaaagcttccacagcgtggaaggggacccaagcgggttgccactgctggctcatgcagcctgcttttattctcttatctggccccacccacatcctgctgattggtagagccaagttgtctgttttgacagggcgctgattggtgcatttacaatccctgaggtagacacaaaagttctccacgtccccaccagattagctagatacagagtgtcgacacaaaggttctccaagtcaccaccagagtagcgagatacagagtgtcgattggtgcattcacaaaccctgagctagacacagggtgctgattggtgtgtttacaaaccttgagctagatatagagtgccgactggtgtatttacaatcccttagctagacataatggttctccaaggccccaccaaagcagctagatacagagtgtcgactggtgcactcacaaaccctgagctagacacagggtgctgattggtgtgtttacaaaccttgagctagatacagagtgccgattggtgtatttacaatcccttagctagacataaaggttctccacatccccaccagactcaggagcccagctggcttcacccagtggatcccacgccggggctgctggtggagctggctgccggtcccgtgccgtgagcccgcactcctcagcccttgggtggttgatgggactgtgtgccgtggagcagggggcagcgctcgtcggggaggctcgggctgcacaggagcccagggagttgggggaggctcaggcatggtgggctgcaggtcccaagccctgccccgtgggaaggcagctaaggcctggcgagaaattgagcacagcagctgctggcccaggtgctaagcccctcactgcccagggccggtggggccggccggccgctccgagtgtggggtccaccaagcccatgccacctggaactcgcgctggcccacaagcaccgcatgcagccccggttcctgcccgcacctctccctccactgctcccctagaaagaggagaagccatgttgcccaactccagaggcttgtataagagtttgaaagatgtctgatttcagaagccttttcctgtaaacaccgggcggcatttcgtactatccctgactggttagtgtaaaaacaacactcttgccctaagaaggtgcagagtcatcctttttcagcagtgaggaggtctaggccttggcggttttggagagtcactgctaccaaagagtctatttgggactgtaaagtaaggatagatttcattatttcttgcaaactgtctgagaggcagatatgggttgaagatccacataagtagaatatgccttggctgggtagatagacatttaccctgggttttaaaggaatagggtacactgtttttttttctttactacttccatctctctttctctttctctttgacttctcctttgtctctctttctctttctctttgacttcttcctctctgtctccttctctgtctctttgacttcctgtctctttctttctctctgtttcttcctctctctctttctctgactttctctttctctctttccttcttgctgatctttccctgcctctgccagccgcttatgctgctgctctcccctcttcttcccattttgatggctttggcagtgtaagagtgccacccccttgtgtttttgcattgtgtgcaataactctataatttccttgtggtatttgatgggggttcccccagaggttaggaactccctctctttccatattgcagcatgggcatataggattagataagcatacttgctatctgtatacacgtttattctttttccctttcccagttctaaggcttgggtaagtgccactagttctgctaactgggcactggtccctgggggaggaggcttactctcaagtatggttacatcactaactatggtgtaacctgcccttcgtatcccattctccacaaatgaacttccattggtatataggtaaaggtcaggattagttaaggggacttctaagagctcatctcaggcggtgtgagtctggactataatttgttggcagtcatgctcgattgtttccccgtcctctgggagaaaagtggcagggttgagggccacacacgtgtgtatttgaaacactggtccctcaaggaggagtgcctggtatctaagtaggtggttgtctgatagccataaacttcctttggcacctcgtatgccatttacatcatgagtagtccagacagtgagaccctttccttgtattattttgatagcctctgacactaagacggccactgctgcaactatgcttaaacagtgaggctagccttttgctactacatcaatttccttacttagctatgccactggttgtggggttgtcccacgagtctgagtaaggactccaagagctatcccggctctctctgtgacgtataaagagaagttttgtcctgtgggaaggcttaaagctggagcttgtactagggcctgttttaaggttttgaaggctctttctgcctctggttcctattcgactagatgagtatttgccctctgggtttccttgattagagtatagaggggcctggctatctcactatctggggatccatagtcggcaaaagctagcaattccaaggaaccccctcaactgttttaatgtcttagggtgacgataagccagtataggctgtattcgttccttgctgagggccctggtccctttggctaagattaggcctagatatttaacctgcggtaggcaaagctgggccttcgacctagacacctcgtacccttgattagctagaaagttcaagagatctagagtagcctgctggcacgaggcttccgaactggtagccaaaagtaaatcatccacatattgaaggatcagagtgcctggacttgagaagtggcctagatcttgggccagtgcctgaccaaacagatgagggctatccctaaacccttggggcaagaccgtccacgtaagttgggacatgtggtctgtgggatcctcaaaagcaaagaggaactgggaatcacagtgcaggggaatacagaagaaggcatccttgaggtccagaaccatgaaccattctgccttctctggtatttcagagagcagggtataggggttgggtacaactggatatagtggaattactgcctcattgatgagtctaagatcttgcactagtctccactgaccattcggtttttgtactcctagaattggggtgttgcagggactgctgcatttccttactaagccttgagctttcaaatgtttaacaatattctgtcatcctttatgagcttcaggccttaagggatattgcctttgataaggaaaagtggtgggatcttttaacctgatttggactgggcgggcattttttgcccttccaaattgtccttccaatgcccagacttcagggttgattccctcctcaagtaggggacaacaaatgggtaacttgttccccatattcatgtagataatagctccagccttggctaatatatccctccctaataagggtgcgggactttcaggcataacaagaaagccatgtgaaaagagcaaagtctcccaattacaactgagaaggtgggagaagtacctggttacaggctatcccaggattcctcggatggtaacggaccttgaggacagtcatccaggacatgagattaacactgagaaggccatgccagtgcccaggaggaagtcaatttcatggccctcaatggtgaaacatacctggggctcagtgagggtgatgacatgagctggcgcttgccccgggcaccctcagtcctgttgttggatcatctggttgggggcttctgacccagggaaccttcatcctctggcacagtgcaccttccagtgattgcctcagcatagtggacatggacaagggggcagcttgtttctcattggacaatctttttaagtgtcctagtaaatcacactgatagcaagccctaccgggtgattggcctgctccattttctatcctctctgaaccaccaaggtttgtttatctgagggccatgactaaggctgcagcctttctctgatctcgcttttccttttgggcctctttctcttggtccctattatagaatactgaggttgccaggtttaataatgcctctagattttgttcagggcccagggcttgcttttggagctttctcctgatatctgcagctgattgggtaataaacttatcttttagaatcaattgacccttgagtgattcgggtgacaggggagtatattttcttaaggcctctcgtagccgctcaaggaaggaagagggatttttctttctttccctgagttatggtggacatcattgaataattcatcagtttttttctaattctccttagtccttctagaacataggtcaacaaatgtttatgactccagtccccatgatcggagtcaaggtcccagtggggatccatactggggatggcttgctgaccagtagggaatttgtccctttctttggttgtcattctatcatttacttgactaagataccaggtatctccaaactctcgggctgcagctaaagctgcattcttttcattaaaggacagggtttgatctaacagtagcatgacatctctccaagcaaggtctaaggtttgccctagaccctgtaggacatctacgtacctatcaggatcatctgaaaacttccccaggtctaccttgatctgctttaaatcagagagggagaaggggacatgtacccaggttgggccaaattcccctccccctacagcttgaaggggacataaccgatagcccaggggtttttgtggtcccttggagatttctttgcttgtttccttccggcaggggagattagaggaggattattattaataggaaggggagctatagggaggctgggatatgggggtaagctgagaggtcctcctgtgggacataaattgcaagctttgcatagttgtgtattctccctcaatgaaaagaaagcttggacataaggtatttcattccatttgctttccctctcacagaaaaggtcaagctgcaggatagtattgtaatttgtacttccctcaggtggccatttttccccatcagaaagagaatattggggtcaagccgtagtgcagaaaaaaaatgagccacctctttttcagggtttgtgggtcaaattggtcccagtggcttaggatgcatttcaagggtgagcctgttgatgcctgagtgtttcccatctgaaagacaaaaccgcccatggttttggtttattttgtttttccccctgcccaagaacctgcaacagtccctggaccctgctgatcagaatagttgtgctcaccgacgcagcagcagaaacaacccctgcccaagaacccgcaacagtccctggaccctgctgatcggaatagttgtgctcaccgacgcagcagcagaaacactagttttcctcccagaccacatggagaactgaggaaggtcggatttagtggcccttaccaacacattctcgaaaacctgcacccttgcctgtcctcctagaccacaaggaggaccaaccgagaaaaatcggctttagtggcccttactgacgcattctcaaaaacctgttagagtcctaagcattcttctgttagtattgggactttacccctttcctataaagatgttatgccccaaaaatgaagtggagggccataccctgagggagggaagtgatctccagggttggaagagtgacaccttttgtcctcacttatatgaataggaaggatacaatttctgaggctccccatatcctagcttcaggaatagcttttgttatgcctattagtctgaggagggatcctaaaattccaggtagtccccactatgatggggctttgggcaaaaattatgtctttctgattggtgagcccgggtgcctaaagaaggtaacagagtcctggagtttattctagaaatcattcttataggagaaactagaaaagcaccagagacaggtagcaatttttagaagtgggactaacctcggagaagagaggcaagaggaagtttgtctggcaggcattaggacccagggggcaagcatcaggatagataggatagatgggcgagagtctcgcttgggcaacatgcctttgagagttctgctcatggccacagggtcaaccaacttgttgtcaggaccccggagctgcatggctttcctctctgtcaaccctcggctcagcccagaagtacaggaaaagtggaagctggttctaggcaaaccaacagtcccaacttcgaagagtcgggggttgttagagagccctttcccagaaagcctgacacccgtgtctttagtctggcggccgtgctagtcgcttttaactggccaacaggtgcccagtatttagccctcgaattttaaggaaaaataggacagaatagcaagtgaaaagcgtccgatggtactcactgcttggcgataagcaattgtctcgccgcacagtgacaggcaatggtctcactgcttggcgatagcctcaccgcttggcaataggtgatagtcccttcgtggtcaccaaaatgtgcccggaattggtgggttcttggtctcactgacttcaagaatgaagccatggaccctcgcagtgagtgttacagttcttaaaggcggcgtgtccagagtttattccttctgatgtttggatgtgttcggccttctggtgggttcatggtctcgctggctcaggagtgaagctgcagaccttctcggtgagtgttacagctcttaaggtggcacatctggagttgttctttcctcccagtgggttcgtggtcttgctggcttcaagagtgaagctgcagaccttcacggtgagtgttacagctcataaaggcagtgtggacccaaagagtgagcagcagcaagatttactgcaaagagcgaaagaacaaagcttccacagtgtggaaggggacccgagcgggttgccactgctggctcatgcagcctgcttttattctcttatctggccccacccacatcctgctgattggtagagtcaagtggtctgttttgacagggtgctgattggtgcatttataatccctgaggtggacacaaaagttctccaagtccccaccagattagctagatacagagtgttgacacaaaggttcttcaagtcaccaccagagtagctagatacagagtgtcgattggtgcattcacaaaccctgagctagacacaaggtgctgattggtgtgtttacaaaccttgagctagatacagagtgccgattggtgtatttacaatcccttagctagacataaaggttctccacatccccaccagactcaggagcccagctggcttcacccagtggatcccacaccagggctgcaggtggagctgcctgccagtaccatgctgtgcacccacactcctcagcccttgggtggttgatgggactgggcgctgtggagcagggggcggtgctcactggggaggctcgggctgcacaggagcccagggagttgggggaggctcaggcatggtgggctgcaggtcccaagccctgccccgtgggaaggcagctaaggcctggcgagaaattgagcacagcagctgctggcccaggtgctaagcccctcactgcccagggctggtggggccggctggccgctccaagtgtggggtccaccaagcccacgcctacccggaactcgcgcaggcccacaagcaccacgcacagccccggttcctgcctatgcctctccctccacacctctccgcaagctgagggagccggctccagccttggccagcccagaaaggggctcccacagtgcagcggcaggctgaaggtttcctcaagtgccgccaaagtgggagcccaggtagaggaggcgccaagagtgagcgagggctgtgagcactgccagcacgctgtcacctctcagtaccagtaccatgctgttttggttactgtatccttgtagtatagtttgaagtcaggcagtgtgatgcctccagctttgttctttttgcttaggattgtcttggctatgtgggctcttttttgttaccagaatgaaatttaaagtagttttttctaattctgtgaagaaagtcagtggtagtttgatggggatagcattgaatctataaattactttgggaagtatggccattttcatgatatttgttcttcctatccatgagcatggaatgttttcccattcgtttgtgtccacttttatttctttgggcagtggtttgtagttctccttgaagaggtccttcacatctcttgtaagttgtattcctagggattttgttctctttgtagcaattatgaataggagttcactcatgattcggctccctgtttgtctattattggtgtatagcaatgcttgtaatttttgcacattgattttgtaacctgagattttgctgaatttgtttatcagcttaaggagattttgggctgagacaatggtttctaaatacacaattatgtcatctgcaaacagaaacaatttgacttcttctcttcctatttgaataccctttatttcattctcttgcctgactggcctggctagaacttctaatactatgttaaatagaagtggtgagagagggtatccttgtcttgtgtcggttttcaaagggaatgcttacagcttttgcccattcagtatgctattggctgtgggtttgtcacaaatagctcttattattttgagatacattccatcaatacctagtttattgagagtttttagaatgaaggggtgtttaattttattgaaggctttttctgcctctattgagataatcatgttgtttttgtcattggttctgtttatgtgctggattacatttattgatttgtgtatgttgaaccagcctcacatctcagggatgaagttgacttgattgtggtgggtagctttttgatatgctgctggattcggtttgccagtattttattgaggattttcgcattgatgttcatcagggatattggccagaaattttctttttttgttgtgtctctgtcagttttttgtatcaggatgatgctggcctcataaaatgagtgagggaggagtccctctttttctattctttggaatagtttcagaaggaattgtaccagctcctctgtacctctggtaaaatttggctgtgaatccatctgatcctgggcttttctttgttggtaggatattaattactgcctcaattttagaacttgttgttggtctattcagggattcaacttcttcctggtttactcttgggagagtgtatgtgtccaagaatttatcaatttcttctagattttctagtttatttgcactaggtgtttatagtattttctgatggtagtttgtatttctgtgagatcagtgatatcacctttatcattttttattgtgtctatttgattcttctctcttttcttctttattagtctgtctagtggtctatgtattttgttaatcttttcgaaaaatcagctcctgggttcattgattttttttgaagggttttcagtctctgtctccttcagttttgctctaatcttagttttttcttgtcttctgctagcttttgaatttgtttgctcttgcttctctatttcttttaattatgatgttaaagtgttgattttagatctttcccactttctactgtgggcatttagtactataaatttccttctaaacactgcttcatttgtgtcccagagattctggaacattgtgtctttgttctcattggtttcaaagaacttatttatttctgccttaattttgttatttacccagtagtcattcaggagcaggttgttcagtttccatgtagttgtgcagttttgagtgagtttcttaatcctgcattctaatttaattgcactgtggtctgagagactgtttattatgatttcaattgttttgcattagttgaggagtgttttacttcctgttatgtggtcaattttagaataagtgtgatgtggtgctgagaagaaagcacagtctgttgatttggggtggagagttctgtagatgtctattaggtcagcttggtccagagctgagttcaagtcctgaatatccttgttaattttctgtcttgttgatctgcctaatattgacagtggggtgttaaagtctcacactattattgtgtgggagtctaagtctctttgtaggtctctaagtacttgccttatgaatctgggtgctcctgttttgggtgcatatatttttaggataattagctcttgttgcattgatccccttacgttcatttaatgccctttttgtcttttgtgatctttgttggtttaaagtccgttttatcagggactaggattccaacccctgcttttttttgctttccatttgcttagtaaatattccttcatccctttattttgagcctgcgtgtgtctttgcatatgagatgggtctcctgaatacagcacactgatgggtcttgactctttatccaatttgccagtctgtgtcttttaattggggcatttatcccatttacatttaaggttaatattatgtgcgaatttaatcctgtcattatgatggtagctggttattttgcccgttagttgatgcagtttcttcatagtgtcgacggtctttacaatttagtgtgtttttgcagtggctggtgtgggtttttcttttccatgtttagtgcttccttcaggagctcttgtaaggaaagcctggtggtgacaaaatctctcagcatttgcttatctataaaggattttatttctcctttgcttatgaagcttagtttggctggatatgaaattctgggttgaaaattcttttctttaagaatgttgaatattggcacccactctcttctggcttgtagggtttctgcagagagatctgctgttagtctgatgagcttccctttgtgggtaacccaacctttctctctggctgcccttaacattttttccttcttttcaaccttggtgaatctgacaattacgtgtattggggttgctcttcttgaggagtatctttgtagtgtcctctgtatttcctgaattttaatgttggcttctcttgcaaggttggggaagttctcctggtaatattctgaagagtgtttttcaacttggttccattctccctgtcagtttcagttacactaatcaaacgtaggtttggtcttttcacatagtaccatggaggctttgtttgttcctttacattctttttttctctaatcttgtcttcacactttattttattaagttgatcttcaatctctgatattctttcttccacttgaccagttcggctattgatacttgtgtatgcttcacaaaattcttgtgctgtgtttttcagctgcatcagctcacttacattcttctctaaactggttattctagttagcaattcctctaacctttttttcaaggttcttagctttgttgcattgggttagaacatgctcctttagctcagaggagtttgttattatgcaccttctgaaacctacttctgtcaatttgtcaaaatcattctctgtccagttttgttcccttacaggtgaggagttgtgatcatttggaggagaagaggcgttctggtttttgtaattaccagcctttttgtgctggtttttcctcatcttcatggatttatctacattttgtctttgatgttggtaaccttcggatggggttttgtgtggacgtcttttttgttgatattgatgctattcatttctgtttgttagttttccttctaacaggtccctatgctgcaggtctgctgagtttcctggaggtccactccagaccctgcttgcctgggcatcatgagcgaaggcttcagaacagcaaagattactgcctgttcctcctctggaagcttcatcccagaggggcacctgccacatgccagctggagcactcctgtatgaggtgtctgttgaccctgctgggaggtgtctcccagtaaggaggcacgggggacagggacccacttgaggaggcagtctgtcccttagcagtgcttgagcactgtgctgggaggtccgctgctctcttcagagctggcaggcagaacatttaagtctgctgaagctacacccacagccatcccttctcccaggtgctctgtcccagggagttgagagttttatctataggcccccgactgaggctgctgcctttctttcagagatgccctgcccagagaggaggaatctagaggtcagtctggctacagcagctttgtcgtgctgcggtgggctctgcccagttcgaacttcccggcaactttgtttacactgtgaggggaaaaccacctactcaagcctcagtaattgtggacacccctccccccaccaagctcgagcatcccaggccaacttcagactgctgtgctggcagtgagaatttcaagccagtggatcttagtttgctgggctccatgggggtgggatccactgagctagaccacttggctccctggcttcagccccctttccaggggagtgaacacctctgtctcactggtgtttcaggcgccactgggatatgaaaaaaaaaactcctgtagctagctcggtgtctgtccaaacagccgcccagttttgtgcttgaaactcagggccctgctggcatacgaacttgagggaatcgcctagtctgtgggttgtgaagatcatgggaaaagcatagtatctaggctgaagtgcaccattcctcacagcacagtccctcactgcttcccttggctaggggagggagttccctgaccccttgcacttcctgggtgaggcaatgccccaccctgatttggctcaccctccatgagctgcacccaccatctaatgagtcccaatgagatgagccaggtacctcagttggaaatgcagaaatcacccgccttctgcattgatcttgctgggagctgcagactggagctgttcctattcagccatcttgtcagccactggccctaaaagtggttttaactgtgtggttttgattgcttctccatcacttattacccctgctggcaccattagagatggcataaataaagtgactttcctagacacttgccatgacgctttgtatttaactgtgtctttatattacagacacttgtagattaagtatcttcgaaggagaggaataagagttggacagcctcttaagatatatagaatcctagtgagaatattaatcttctataggtaatgaaagcaattcattatttcataccaaagactagggtctgttagtatcatcaccattcttgggaattgtgaagtgagtcatgtgcatggaagtgggaggagtcaaaaatctggagctttcctctgggtctctctctctcttttgtttttttttttttctgagacagggtctcactatgttgccccggctggtttcaaactcctgagctcaagcaatgctcttgcctcagcctgccaagtgctgggattataggcatgcaccacatctggcacggtctctctggatctcatgttttcatggtcacatttgggaaactcagctcacctcactcttcaaaatactggtcatattttccattttcttagtttcttggtgtcctatgttaggtggttgtttgataaattttcctcgtacaaagcagatgctcaacaatattgataatatggaatgtctaccactctcagggatgttgacattggagcagaggatcctgagtgcctcaatccaaagaataattattaagtttattggttagaataaaaataataataggcataactttatacagcattgactatgttttaggcactattttaacactataaatgcattcttgtttcatcttcttctcctcactttatggatgatgcatttgctgaagatcatacagctgataagtggcagaattgtaattcacttgatcttagccaaaaggctgagaagcaatgcagaattgtaattcaattctagccaaatctgtctgatgcaggagtcaggttctcaaccattataatatagggactctgttttgtactgtgtatttatttttctgcagtagtaattctgctttttactgcatatagccactattttcttgctctatcatttatttcattgaacctgtgttttctcctacttgttcccattctgttgccatatcgtctttaatctcactgggcataggaaatagccagttgtgtagaatattcttctgattcataaagtgaacctcagaggaaaggagtttctcagctcttgactttttgtttcttttcattataaagcatttgttttctgcactatttagtctccatgattttgacttgttgatcctccttgctattcacaaatctaaaaagatggttttaactacttgtcttaaatgttggtatttgaagcttcctaggacaaggctgaagtagcaggccatatggggtgacagccctgacccatgccaggtgggctgccagggtttcattaactaggactgggggtacaggtcttggatcccatttctgaggtatggttgtgcatagattttcccaccacacacatctggccactgaggttaggcacgttagaggagaaagccagactgtgacaaagtcttacttggttgtgaggcagggtagaggctttatattattattgttgtagttactgaaaaatatttacagtaataacattggagacaagcaggttgctgacattgctacttattccacaatattcctgaaatcctacagtctgaaccaagtgtggaatttttcacaaactgtgacaaactgagatcttttagagcagaagcatccctgaaatcacaccacagttgctgccaacttggcctaaacacagagcccagtggtgctggcatctgtgaacacccatcatgcatttcactgtgactgtagcacttgacttttgcagctttatacccgcgtcatatatattttgtgagggtttgagacatagttgtggccctatagaggtacacagaggaatgcatgctggctgagcttttggacaaagagggtcttggaaatctgcatgatgatgtggaaagaatgtaggctttgaaatcagacttgtcactcttggctttaaaaactggctctaatattactagttctgtgatcttgggtttggcaaatgacatgtttagtttcaattttatcatctgtaatatgccaatcacacagcatataatcaacatgtcaaactaataattacgtattttaagtcagtttctctcactagtccaaggttcatgagaatggagagttcatgtcttgctcattgctatattcttactatacctagtacagtgtctagcaaggactaagtgttcaataagcatttattaagttaataaggagctctacaataaaactgcttgggttttaattggaattgcattacatgcataggtcaattttaggaatatttacatttttatgagtacacactttaggattcatgaacatatctttgtatttaggttttctatgttttcaataaaattttgtatttttgctctaaagatattatacatcttttgttagatttattcctaggtatctgaaatttttactgtactgtaaaagtctttttataaaaaagcacattttaaaatttttgcgttgatacttagaactgcaactcaaatgtacatattattttttaaggagccaagtttttaatttttcttactattctagtaatttttctgtagattcattgaagttttctacccaatgatataatttgcaaataaagacaattttatttcttaccccccaatccttatatcttttcttttttctttttttttccttattgccttatctaggacatctagtacaatattgcatagagacagaaatagtgagatcctgtcttgttattcatcttacagggaacagttatagtgtttccccattaagtataatgcccgttacgggttttctttgtagataccatttacatattatagcagttccctgtcattataattttttaaataaataaatgttagtttattgaacttctttgtatgttgaaaagattacattttgaattatcttcaatctgttaaaatgtagataattatatcactgataatgttaaatacattttgcattcctggggtaaatccaaattgtttacggtacactatgcaatctctttattgtttacataggtcacatagggaaaattaaactcagagaagttgagctacttgcccaaggccacacagcccaagtatttgtaaaaagcagatgactgaggccagacacggcagcttatgcctgtaatcccagcaatttgggaggccgaggcagggggatagcttgagtccaggagtttgagaccagcctgggcaatatggcaaaaccccatctctacaaaaaatacaaaaattagccaggcatggttgcgcatgcctgtagtcccagctaattgggaggctgaggcaggaggattgtttgagcccgggatgcggagtttgcagtcaagtgagattgtgccattgcactctagcctgggtgagagagcaagaccatgtctcaaacaaacaaacaaaaaacaaaacaaaaaaaaccacacacacacacacacacacacacacacacacaaacaaacaaaaaaactgaaaccttgaagttctgagtaatatagcctggatgaaatggactaatcataaaaggtgtttaggtattgccagcagaccacttcatttagaaagaacgaaccactctgccccttggataacatcacttaaaactaaactgtcatgcattactgccctctgggatcccaaagtttcatttagggtcattgcaggatccccattatctcttaagtaaatcctcggggaagctattaaacctctgggtaagacaattctctgttattagaaaccaggatcatataattatttgaggattaaaaaattggacttgatttgatttttccagctaactgactttagacagttgctattttccatttgtttattatattataatctattgtttaatatcacagttggagtatgcatatatttcaatcagtgactcattttggtaaccaagatattcggttgtcaaagtattactccaaaatacatattaagttttttaagaattatattcaaattcacgtttatcagaccagaattcctctctttgaatttagtgtgcttctagcaatgcagtctctggcacacagggttatgaaaagaccctaatttgctaaacaagccaactgaccagtcctgcagatagaaggtgagcaagtacaaaagcagcagccgtgaaacccagggaacagtcagtgtttgtgtcttagacacctatattttcatttaattatttttaataggctttatttttagagcagttttgggttcacaacaaaattgagcagaaggtacagaagttttctgtgtatcccctgcccccactcatccatagcctcccccattatcaacatctgctaccagagtggtacatttgttacaattgatgaacataattgacacatcattatcactcaaagtccatagttgacattagggttcactctcggtgttgtgtattttatgggtttggacaaatgtacaatgatgtgtgtccaccattatgttatcatactgcccaagaaatcctctgtgctacgcctgttcattcctccacttaccataacttggcaaccattagtatatttactgtctccatagttttgcctttcccagaatgccatatagttggaattgtctagtatgcagtctcttcagactggcttctttaacttcaagtaatttgaatttaagtttccaccacatcttttcaaagcttgattgctcatttctttttagcactgaataacattccattgtcaggatgtaccagtttatccattcacccacttaaggaaatcttggttgcgtcccagttttggcaattatgaataaagctactataaacatgcatacacacgtttttgtgtggacataagttttcaactcctttgggtaaaaaccaagaagtgtgatttctggaacgaatgataagactatgtttagttttgtaagaaactgccaaacggtcttccaaagtggctgtaatatttttcattcccgctagcagtgaatgaaagttcctattgttctacatcctttgtgttgtcacacaaaggatgttagcatttggtgttgtcagtgttctagattttggccattctgacagctgtatagtggtattttattgttcttttaatttgtatttcactgataacacatgatgcagagcatcttttcatgtgatcatttgtaagctgcacacattctttggtgaggtgtcttgtaagatctttgacccactttttaactgagtggtttgtttctcaatgttaagttttaaatatctttttatattttggataacagtgctttctcacgtgcatcttctgcaaatttttctcccagcctgcggcttgtcttttcatttctttgacattgtctttcacagagcagaagtttttaaagttaatgaagtccgtcttaatcaatgatttgtttcatgtattgtgcctttggtgttgtagctacaaagtcatcactatatctaaggttatctaggttttttcctgttatcttctaggagttttatagttttgcattaaattttccattttgagttaaaatttgtgaagtgtgtaaagtctatgtccagatcttttatgcgtgtagatgttcagatgttccagctccatttgtgcaaaagactatctttgccccattgtattgcctttgttcctttatcaaagatcagttgactttatgttggtctatttctgggctctctaatctattccattgatctatttgtgcactttttcaccaatactgcacttccttgattactgtagctttatagtaacttttgaagttgggtagtattggtacttcaacgttgttcttctccttcaatattgtgttggcaatattgtgttaatacacttgggctgcaatagcaaaataccttacactgagcggcttataaatttatttctcatggttcttgaggctgagaaatccaacatcaaggcataagtagacttagtgtctgtgctctggttcataggtggtgacttctagttgtgtcgtcacacggtggaaggggtgagctctgtggggtctgttttataagggcactaattcccttatggtacaatcacctctcaatggccccacattaccctgggggtttcgaaatatgaatttgggggacatacaaacatttaggccttagtagcaaataaactttagaatcagtttgttgatattgacgaaataacttgttgggattttgattgaggttgcattaaatctaaagatcaagttgggaggaattgatatcttaataacattgagtcttcctactcgtaaacatgaaatatctttcagtttatttagttctttgatatctctcatctgagttttgtggttttcctcattttccttctctctaaagaacttttaaatatattttttgcaaggcaggcctactgacaagaaattctttcaactttgtttgagaaagtatttctccctcacttttgaaggattatttcacagggtacagaatcctagcctggttgttgttgttttttttacttcaattctaaatatttcactgtattctcttcttgcttgaaaggttcttaagataagtaggatgcaattcttatttttttcctctataagtgctatggtttggatatggtttgtttgtccccatcaaatcctgtgttaaaatttgatccccattgtggtggtggtgggaggtgaggcccagtgggaggtgtttcagtcatgagggtggatctggtacaaatggtttggtgccattcttgtggtagtgagtgggcttcactctggtgagactcgtttagttctcacaggaatggattagtttcctctgagagtgagttgctgtaaagccaggatgcccctcaggactggttcctcttcacatgtgcccacttcccctttgaccttctccaccatgttttttgacacagcacaaaagcctcaccagaagaggggcagatgctggcatcatgcttcttatacagtctacagaacagtgagccaaataactctcctttctttataaattacccatcctcaggtattcttttatagcaatacaaaatggactaagatactaagtaaggtatttttcccctctggcttcttttgggatttttttctttatctttgatttcctgtagtctgacagtgataaacctacgggtattttgcggggggatttatcctttttgatgttctctgagatttctgtatctgtggcttggtgtctggcattaatttgggggaaattattagttgttattgtttcagataaccttctagtcctttgtctttttcttctctttatggtatttccattactcacatattatatcctttgtagctgttctgggttttttcagtctttgtactctgcttttcagatttgaaggtttctgttaagatagtctcaacgtcagagattcttccctgagtcgtctccagtctactagtaagcccattgaaggcattcttcctttctgttatgttgatttttatctctatcatttctttttggttctttcttccatctctctgcttacatcatccatatattcatgcatgctccctactttatccatgagagcccttagcatataaatcgtagttgttttaaatcttgatctgataattccaacatccctgccatatctgagtctggttttgatgcttgctctttctcttacaaatgtgcttttggctttttggtatgtcttataattttttactgatagccaggcataatgtatcctgcactgtttcccatagagattattacttcagtaagttgtgattttctctattctcctgttagtctttttaatttggcggtagggggtgggggtggtggcagcagttttccctgtgaccttgcctctcttatggatctaagaaaagcttctgatttttcagtttgttcagctttttacttattgttacatggagtgacaatctttaatattcttacatgctagactggaaagcagaagtcctttatttatttttcacctttattgagcctgccacctttcatgactcactgctagggactgcaccaaagtcttcaagctgtgaagtggcaagaggtgacatccaaggacatctttatgcaatgtcctaagttttttgtgttactccccaaacattatatattgggtaagctccatagtaattaaagttagaaaaatgagatttgttgttgttgttctctaccagcttggccaggtttcttaaactggaaaatgttggaacaggagtaggggaatggtcaccatcatatactgttggcaagagttcaaatttatacttttatttgaaggataattaaataatatctgtcaatatttcaagtgcacacatactttggtctagtaaattcacttctaataattttccaagagaaattatgggacaaatataggcaaagacacatattctagaatgttttgcagttttgtgtatgatagcaagaatttataaatagaaagattttcatccatatgggatattttgaatacatgatggtgcattttacaatgaaatattatgcagccaccacaaagaatgatagagacatatttattaacatgaaaatatgtccttaatatatgacttaacttaaaatactaaaatacaaaagtaaagcttaaacctatttttgttgaaaattatctgtgaatatatgaatttaaaattctaaaagcataccaacatgttaatagtggttgttttggatgattgttttcttctttatgtctttctggtatgagtcttttataagagaaacataatttttctatttttattttagaaaaagactgtttttgtgaaaattcatttttatgaattacattgacagatgagttacaaaatttaaaagttttattttaataacaaaaagaaaaacaagctctaaagaacacttattaagccaagtttaagtacaaacaagtctcctaaatttaaatccccaatgacaccttttcctccttcttcattgttcaaaggaaagcaaatccctaggaggctattatgccttttggaaagacaatttcctcttatcgggagccaggatcacagaattatttaaggataaaaaaacggacttgatttgattacttccagccaagtgtctttatatagctgttatttttccgtttctttattttattataatccattgtttaacgtcacagttggagtttatatatatttcagtaaattactcgttttgataaccaaggtatttgtaagaaaaggaaataatttttaagcagatgtgtcaattttgaaacattgttcaaaattaccttttcacttacaggactcattcaggggcactgtggccagtggtagatgcaattaaagttgcatgtattctattcatacctggagaatatgtattctctctgtaagaacccactggttcaactgtacagcgaaactcatcttagccccaaattcagagcagagatactgctcaggaagccatttccaaaaatacatctccaaatttaacggaaagaaatctactatttcttaagttctattatttttttgttattaaatgaaaaattattaatggataacatccatgccttgcatgtgatgggaacaaaacgtgggtttatggctctcgaatgtgaagacatttaatgagctctaggctaatagggtttgtggagaggatgccagtcccactaagacaatggagaagcagtggttttttggttttttttttgacatggagttttactctagttgcccaagatggagtgcaatggcatgatcttggctcactgaaacctccacctcccaggttcaagcgattctcctgcctcagcttcccaagcagctgggactacagtcactcaccaccatgcccggctaatttttgtatttttagtagagacagggtttcaccatgttggtcaggctgatctcgaactcctgaccttggatgatccacctcggcctcctaaagtgctgggattacaggcgtgagccaccgcacccagtcaatagtggttgttataggcagaaaacatcactgcactgatacattctatagaaggcttattggaagagagaatatttcagacacgactctgatataacttgaattgactattattatgagccagagaaataaaaataacacatagtcactgcagttgataaacctgccaaccatagagggagactgctgttcaggcccaatgtagaaaaggcaattgtgggcacacggggtacttgtcactcagacaaaaggccaccagccttggtgcctttactgagcatgcagctgcctgcacgggcttatacctatgtacctgtctctactttgggcaccacagaaaatgtaattcctaggaacctatgataggggcaaatattgaagaaaagagaaaaaatccatattcacaaacttcataagaaactcattatactttctttcttatatattctctttcagatatatattttaaagtggatgtgtagtgtatgcgtgtggtgggagaaagggtagaatgcattcctcccctgcaattcctttatgcctaatatgaaattgttcaattcctaaaacctaacaaatattagcattttgagaaataatagaattgaggctgggtgcagtggctcacgcctgtaatcccaacactttgggaggccaaggtgtgtggatcgcttgagcccaggacttcaagaccagcctgggcaacataatgagacctcgtcattataaaaaaaatacaaaaattagccaggtgtgggggcacatgcctatagtcccagctactcgagaggctgaggtgggaggatcactagagccttggaggtcaaggctgcagtaagctattattgcagtactgtaccccagcctgggtaacagagtgagaccctgccaaaaaataaaaaaggaagggaggaagaaaggaaggaaggaaggaaggaaggaaggaaggaaggaagaaaggaggagagggagggaagaagaaatagtacaattggctgtctaggaaaatccacagctttacgggaggcagtgggaggctgacctcacctagacttgtgggactgaagaagaaagcacgagatgcactttgtgtcctttattctctgtgcttggttatttcactctttctctgaactctggtggctctcacctgtgtgggcatgcattgtctcatagagttatatctcctttcttcgtgtttggcctgtatctccaactagattaaaatctcccagaggcagtttttaatgcagactcagcaaactgagtctcctatttttgtgaggtcccaagccctagaacaatggcctatggaaaagacacaataaatgattgttgatgttgctgttaacattgatggatgctggtttgagaggtcttatttcgttaattgcttaatccttaaacaaaagtttctctacaaggattggcttttgttccacacacttgctaacacttgttggctcttgtctttttgataatagctgtctgtgatatcttatagtgattttgctttgcattcccctgatgattagtgatgttgaataccttttcatatacctgttggcctgttggctttttttttttttttttttttttttgagacagatcttgctctgtcatctaggctggagtgcagtggcatgatcttggctcactgcaaactctgcctcccagttaaagtgattttcatgtctcggcttccccagtagctggaactataggagtgcaccaccacacctggctaatttttgtattttcagtaaagacaaggttttgccatattggccaggttattctccaactcctggcctcaagtgatccgcccacctcggcctcccaaagtgttgggattataggtatgagccattgcccttggccccatttttatgtcttctttggagaaatctctattcagtcctttgcccatttttaaattaggttatttccttctctgctattgagttgtattttgaatattaactccgtatcagatatatggttttcaaatattttctcccaatctgtaagctatttttccattttgttgattgcttcctttgctgtccagaaactttttagttggatattattccatttattcatttttgcttttgcagcctcaacttttggggtcatatccaaaaaatcattgccaagaccaactttaatgagctttcctcctgtgttttcttctaggagctatggttttgggtcttatgtttaggtcttttatccattatgagttgatttttaagcaaaaaattaaactggagaaacactttcataaaccatgggatgtgcctctaaatgcttaattagcatttttaatttttaataaatgtttcaatgaaaatttttaatgcatgtttttataaatttgatatctatttgtaatttcagagatgtatctctaaagaacgaatgattgcagagacctggtataatcatcattggaggtaacattcccctgaatgcattaaagaaaatgaatattattagctatttagtcttttattacctttgatcatgggaaacagtaggacaagtcaaccaggaaggtttcaggaaactcttaaccgcataatttttaattcaatgattgggtggggactcagaaattagccagttctacgtcccattcaacctaggctttttttcttacgaattgaagcatgttcatgtttgccccacatttccagatcaaaaatactttccccacctgtagtcccagctactcaggaggctgaggcacaagaattgcttgaacccaggaggcgaaggttgcagtgagccgagattgagccattgcacaccagcctgggtgacagagtgagactttgtctcaaaaacaaacaaacaaaaaaacaaaaaaatgattgcccagaaaactgaccaaagcttccctgtgtaaacaaggtgattttgactcaagcagacttaataacagaagatcttgccctgagatgtgatttctgtgtcctgacacagatacaagaagtagcttgatatagtcttacttttaattcatctttaattaccagagatttctagcatagagctcaccagaaaactaagggaaggggttctgaaggacctcttctcttaacaaaaatgagcacttttaaatgagtttaatgaaaaatcccatattttaatatagtattatttggggtgcacttaaatttgaatcccatttatttcacttaacaactgtgccatcttgaggaaaacagttaacgctctaatcttcaatttccttttaaataaaatggacatcaaaatactgtctaagtagacagaccagttgtgcagatggaacctacctcatgatgtcgtggtgagtattaaatgagatatagctttttaaatgtgtagccagggtctggcccaagaataatgtcagctcataaatataacaatatctctgcttcctttcctcagtgacttttaaataatctatcatggtgttcatttataaatagatcacccatgtgactatgtttctagtattctagaatgggtgataacccttctgtggttatcacagccttttggtgatcggagcgtgcagacacagtatgctttgggaaggatagaactttttttaaggagaaaaaccacttcctaatttgtctgttgattttagagcattttccttgtgtgcaagtttaaccattgagtttgcaccaaagaatccaacttatttcactcagctcaagggtttctcctccacaccctttctgaccatctctccacccccactatcagactgtcagatggcctcttgtgggtctcttgtgggagtcccttttgtgggactgtgtttattgactccttgacattgtctataattatctgtttatatgctcacttctccacaggtgttcgagctccttcaggacagggactctgtcttattcatctttgtgtgatcagagcgtagcttagataatagcacagagcaggccctcacaaaaatatataaaatgaaaaaatgaaccatgaagtggggctaagtgggtataaatatggaaatgtatagtgtttcctgaggatcctatttctatttaaggatatataggaagacagttttttcaaagttcatgtttactgtttgggacttttgttaagttgacttatttccttgcctttccttccctttcaaaaactggagagcaaagataaagaaaagaaatgtttgagcataataccacaggccaattcaaatggcatttcagcaagcagagtcacgagttcatgaaacttgtataagatacctttctaaagctgtatggggaaaattggcatctttttccatgacaaggggagagaacattaggaaagggacagacacttcaggcaaatggaccagaagtgttccatctccctgggaagttttgttaaggacattaagctgtggggaggttgaatttatcttcattcctcatcattatgttgtatctctatctatatgtatatctatatctccatgtgtatagttatacttatatctacttatatatttgggagttttttagttgtaactagaacagaaatatattttaaaacatcaaaaaggtttatgatatatcactgaatattaaaaagcatattttaaaacaatgtacaatgtgattcagattcattggtgacagtattatgagcaatttttccccttctttgtgcttttctgaactttcaatgtattttttcacaatgaacatatattaacagtaaagaaaaaaagctgtaaattcttttttttaaattgtaacttgtcttcctataacctattatttacaaagttccctagtcttctgagtggaggaaacagctttgcaggtgaaattttcctgaagaaataactgtctctgatttgatctaatgacagatggcacatgtgaaaactcaattttaacatagacctggcatagccaaggccctccctacatctctagcctctgttcctgccccaaggccaccatggctgtctctaggctcccaggctgcttgctccaaaccttgactggcctagaaagttctcccaacctagacctcagctccaaagtcattctctttatatatatatattttattatactttaagttctagggtacatgtgcacaacgtgcaggtttgttacatatgtatacatgtgccatgttggtgtgctgcacccattaactcgtcatttacattaggtatatgtcctcatgctatccctcccccctcccccaccccacaacaggccctggagtgtgatgttccccttcctgtgtccaagtgttctcattgttcaattcccatctatgagtgagaacatgcggtgtttggttttttgtccttgcgatagtttgctgagaatgatagtttccagcttcatccatgtccctgcaaaagacatgaactcatcattttttacggctgcatagtattccatggtgtatatgtgccacattttcttaatccagtctatcattgttggacatttgggttggttccaagtctttgctattgtgagtagtgctgcaataaacatacgtgtgcatgtgtctttatagcagcatgatttataatcctttgggtatatacctagtaatgggatggctgggtcaaatggtatttctagttctagatccctgaggaatcgccacactgtcttccaccatggttgaactagtttacagtcccaccaacagtgtaaaagtgttcctatttctccacatcctctccagcacctgttgtttcctgactttttaatgattgccattctaactggtgtgagatggtatctcgttgtggttttgatttgcatttctctgatggccagtgataacgagcattttttttcatgtgtctgttggctgcataaatgtcttcttttgagaagtgtctgttctcttaaaggagttttccaattcctatcatgccctttcattgtaccacattcttttcttcctgaatttatttgtgtgatttttatttaatatctgctcccccacccccaacaaaaccatgggcttcatgagatatactcatgactgaatccctatgctagcacactctcaggagtctcaaagggacttagctatttcttgtgtatttga

SEQ ID NO: 12716 - protein, 740 aa, Homo sapiens
  ref <308>: DATABASE ACCESSION NUMBER: SWISS-Prot / CAA18143
  ref <309>: DATABASE ENTRY DATE: 2003-02-01
MANCQIAILYQRFQRVVFGISQLLCFSALISELTNQKEVAAWTYHYSTKAYSWNISRKYCQNRYTDLVAIQNKNEIDYLNKVLPYYSSYYWIGIRKNNKTWTWVGTKKALTNEAENWADNEPNNKRNNEDCVEIYIKSPSAPGKWNDEHCLKKKHALCYTASCQDMSCSKQGECLETIGNYTCSCYPGFYGPECEYVRECGELELPQHVLMNCSHPLGNFSFNSQCSFHCTDGYQVNGPSKLECLASGIWTNKPPQCLAVQCQHLEAPSEGTMDCVHPLTAFAYGSSCKFECQPGYRVRGLDMLRCIDSGHWSAPLPTCEAISCEPLESPVHGSMDCSPSLRAFQYDTNCSFRCAEGFMLRGADIVRCDNLGQWTAPAPVCQALQCQDLPVPNEARVNCSHPFGAFRYQSVCSFTCNEGLLLVGASVLQCLATGNWNSVPPECQAIPCTPLLSPQNGTMTCVQPLGSSSYKSTCQFICDEGYSLSGPERLDCTRSGRWTDSPPMCEAIKCPELFAPEQGSLDCSDTRGEFNVGSTCHFSCDNGFKLEGPNNVECTTSGRWSATPPTCKGIASLPTPGVQCPALTTPGQGTMYCRHHPGTFGFNTTCYFGCNAGFTLIGDSTLSCRPSGQWTAVTPACRAVKCSELHVNKPIAMNCSNLWGNFSYGSICSFHCLEGQLLNGSAQTACQENGHWSTTVPTCQAGPLTIQEALTYFGGAVASTIGLIMGGTLLALLRKRFRQK

SEQ ID NO: 12717 - DNA, 649 bp, Rattus norvegicus
  ref <308>: DATABASE ACCESSION NUMBER: EMBL / L24897
  ref <309>: DATABASE ENTRY DATE: 2000-03-04
aaggccaagaaggccatcactgacgccgccatgatggcggaggagctgaagaaggagcaggacaccagcgcccacctggagcggatgaagaagaacatggagcagacggtgaaggacctgcagcaccgtctggacgaggctgagcagctggcgctgaagggcggcaagaagcagatccagaaactggaggccagagtgagggagcttgaaaacgaggtggaaaatgaacagaagcgcaacattgaagctgtcaagggtcttcgcaagcatgagagaagagtaaaggaactcacctaccagaccgaggaggaccgcaagaacgtgctgaggctgcaggacctagtggataaattacagactaaagtgaaagcctacaagagacaagcagaggaggctgaggaacaatccaacgtcaacctggccaagttccgcaagatccagcacgagctggaggaagccgaggagcgggccgacatcgccgagtcccaggtcaacaagctgcgggtgaagagccgagaggttcacaccaaagtcataagcgaagaatagctcaattccttctgttgaaaggtgacagaagaaatcacacaatgtgacgttctttgtcactgtcctgtatatcaaggatccaagtcataagcgaagaata

SEQ ID NO: 12718 - protein, 182 aa, Rattus norvegicus
  ref <308>: DATABASE ACCESSION NUMBER: SWISS-Prot / AAA72046
  ref <309>: DATABASE ENTRY DATE: 2003-02-01
KAKKAITDAAMMAEELKKEQDTSAHLERMKKNMEQTVKDLQHRLDEAEQLALKGGKKQIQKLEARVRELENEVENEQKRNIEAVKGLRKHERRVKELTYQTEEDRKNVLRLQDLVDKLQTKVKAYKRQAEEAEEQSNVNLAKFRKIQHELEEAEERADIAESQVNKLRVKSREVHTKVISEE

SEQ ID NO: 12719 - DNA, 5925 bp, Homo sapiens
atgagttccgactctgagatggccatttttggggaggctgctcctttcctccgaaagtctgaaagggagcgaattgaagcccagaacaagccttttgatgccaagacatcagtctttgtggtggaccctaaggagtcctttgtgaaagcaacagtgcagagcagggaaggggggaaggtgacagctaagaccgaagctggagctactgtaacagtgaaagatgaccaagtcttccccatgaaccctcccaaatatgacaagatcgaggacatggccatgatgactcatctacacgagcctgctgtgctgtacaacctcaaagagcgctacgcagcctggatgatctacacctactcaggcttgttctgtgtcactgtcaacccctacaagtggttgccagtgtataatgcagaggtggtgacagcctaccgaggcaaaaagcgccaggaggccccaccccacatcttctccatctctgacaatgcctatcagttcatgctgactgatcgggagaatcagtctatcttgatcaccggagaatctggcgcagggaagactgtgaacaccaagcgtgtcatccagtactttgcaacaattgcagttactggggagaagaagaaggaagaagttacttctggcaaaatgcaggggactctggaagatcaaatcatcagtgccaaccccctactggaggcctttggcaacgccaagaccgtgaggaatgacaactcctctcgctttggtaaattcatcaggatccacttcggtaccacagggaaactggcttctgctgatattgaaacatatcttctggagaagtctagagttactttccagctaaaggctgaaagaagctatcatattttttatcagatcatgtctaacaagaagccagatctaattgaaatgctcctgatcaccaccaacccatacgattatgccttcgtcagtcaaggggagatcacagtgcccagcattgatgaccaagaagagttgatggctacagatagtgccattgaaattctgggctttacttcagatgaaagagtgtccatctataagctcacaggggctgtgatgcattatgggaacatgaaattcaagcaaaagcagcgtgaggagcaagctgagccagatggcactgaagttgctgacaaggcagcctatctccaaaatctgaactctgcagatctgctcaaagccctctgctaccctagggtcaaggtcggcaatgagtatgtcaccaaaggtcaaactgtgcagcaggtgtacaatgcagtgggtgctctggccaaagctgtctacgataagatgttcttgtggatggtcacccgcatcaaccagcagctggacaccaagcagcccaggcagtacttcattggggtcttggacattgctggctttgagatctttgatttcaacagcctggagcagctgtgcatcaacttcaccaatgagaaactgcaacagtttttcaaccaccacatgttcgtgctggagcaggaggagtacaagaaggaaggcattgagtggacgttcattgactttgggatggacctggctgcctgcatcgagctcatcgagaagcctatgggcatcttctccatcctggaagaggagtgcatgttccccaaggcgacagacacctccttcaagaacaagctgtatgaacaacatcttggaaaatccaataacttccagaagcccaagcctgccaaaggcaagcctgaggcccacttctctttgattcactatgctggcaccgtggactacaacattgccggctggcttgacaagaacaaggaccccctgaatgagactgtggtggggctgtaccagaagtctgcaatgaagactctggctctcctctttgttggggcaacgggagcggaagcagaggctggcggtggaaagaaaggtggtaagaagaagggttcttctttccagactgtgtctgctctcttcagggagaatttgaataagctgatgaccaacttgaggagcactcacccccactttgtgcggtgcatcatccccaatgaaactaaaactcctggtgccatggagcatgagcttgtcctgcatcagctgaggtgtaacggtgtgctggaaggcatccgcatctgcaggaaaggcttcccaagcagaatcctttatgcagacttcaaacagagatacaaggtgttaaatgcaagtgctatccctgaaggacaattcatcgatagcaagaaggcttcagagaagctcctggggtccattgacattgaccacacccagtataaatttggtcacaccaaggtctttttcaaagctggtcttctggggctcctagaggagatgcgagatgagaagctggcccagctgattacccgaacccaggccatgtgcagagggttcttggcaagagtggagtaccagaaaatggtggaaagaagagagtccatcttctgcatccagtacaatgtccgtgccttcatgaatgtgaagcactggccctggatgaagctgtatttcaagatcaaacccctcctcaaaagtgcagagacagagaaggagatggccaacatgaaggaagaatttgagaaaaccaaagaagagctggctaagaccgaggcaaaaaggaaagagctggaagaaaaaatggttactctgatgcaagaaaaaaatgacttgcaactccaggttcaagctgaagctgacagcttggctgatgcagaggaaaggtgtgaccagctaatcaaaaccaaaatccagctagaagccaaaatcaaagaggtgactgagagagctgaggatgaggaagagatcaatgctgagctgacagccaagaagaggaaactggaggatgaatgttcagaactcaagaaagacattgatgaccttgagctgacactggccaaggttgagaaggagaaacatgccacagaaaacaaggtgaaaaacctcacagaagagatggcgggtctggatgaaaccattgctaagctgaccaaggagaagaaggctctccaggaggcccaccagcagaccctggatgacctgcaggcagaggaggacaaagtcaacaccctgaccaaagctaaaatcaaacttgaacaacaagtggatgatcttgaaggatctttggaacaagaaaagaaaatccggatggatctagaaagagcaaagagaaaactagagggagacctaaaattggctcaagaatccacaatggatatagaaaatgacaaacaacaacttgatgaaaagcttaaaaagaaagagtttgaaatgagcggtctgcaaagcaagattgaagatgaacaagcccttggtatgcagctgcagaagaaaatcaaggagttacaagcccgcattgaggagctggaggaggaaatcgaggcagagcgggcctcccgggccaaagcagagaagcagcgctctgatctctcccgggagctggaggagatcagcgagaggctggaagaagccggtggggccacctcagcccagattgagatgaacaagaagcgggaggctgagttccagaaaatgcgcagggacctggaggaggccaccctacagcatgaagccacggcggccaccctgaggaagaagcatgcagatagtgtggccgagcttggggagcagattgacaacctgcagcgagtgaagcagaagctggagaaggagaagagtgagatgaagatggagatcgatgaccttgctagtaacatggagactgtctccaaagccaagggaaaccttgaaaagatgtgccgcgctctagaagatcaactgagtgaaattaagaccaaggaagaggagcagcagcggctgatcaatgacctcacagcacagagagcgcgcctgcaaacagaatcaggtgaatattcacgccagctagatgaaaaggacacactagtttcacagctctcgaggggcaaacaagcctttacacaacagattgaggaactgaaaaggcaacttgaagaggagataaaggccaagagtgccctggcacatgccctgcagtcctcccgccatgactgtgacctgctgcgggaacagtatgaggaggagcaggaagccaaggccgagctacagagagcaatgtccaaggccaacagtgaggttgcccagtggaggaccaaatatgagacagatgccatccagcgcacagaggagctggaggaggccaagaagaagctggctcagcgtctgcaggatgctgaggaacatgtagaagctgtgaatgccaaatgtgcttcccttgagaagacgaagcagaggctccagaatgaagttgaggacctcatgattgatgttgagaggacaaatgctgcctgtgccgccctggacaaaaagcaaaggaactttgataagatcctggcagaatggaaacagaagtgtgaagaaactcatgctgaacttgaagcttctcaaaaggaatcccgctcactcagcacagaactatttaagattaagaatgcttatgaggaatctttagaccaacttgaaaccttgaaacgggaaaataagaatttgcaacaggagatttctgatctcactgaacagattgcagaaggaggaaagcgcatccatgaactggaaaaaataaagaagcaagttgagcaagaaaagtctgaacttcaggctgccttagaggaggcagaggcatctcttgaacatgaagagggaaagatcctgcgcatccagcttgagttgaaccaagtcaagtctgaggttgataggaaaattgctgaaaaagatgaggaaattgaccagatgaagagaaaccacattagaatcgtggagtccatgcagagcacactggatgctgagatcaggagcaggaatgatgccattaggctcaagaagaagatggagggagacctcaatgaaatggaaatccagctgaaccatgccaaccgcatggctgctgaggccctgaggaactataggaacacccaagccatcctcaaggatacccagctccacctggatgatgctctccggagccaggaggacctgaaggaacagctggctatggtggagcgcagagccaacctgctgcaggctgagatcgaggagctgcgggccactctggaacagacagagaggagcaggaaaatcgcagaacaggagctcctggatgccagtgagcgtgttcagctcctgcacacccagaacaccagcctgatcaacaccaagaagaagctggagacagacatttcccaaatccagggagagatggaagacatcatccaggaagcccgcaatgcagaagagaaggccaagaaggccatcactgatgctgccatgatggctgaggagctgaagaaggaacaggacaccagcgcccatctggagcggatgaagaagaacctggaacagacggtgaaggacctgcagcatcgtctggatgaggctgagcagctggccctgaagggtgggaagaagcagatccagaaactggaggccagggttcgtgaacttgaaggtgaagttgaaagtgaacagaagcgcaatgttgaagctgtcaagggtctacgcaaacatgagagaaaagtgaaggaactcacttaccaaactgaggaagaccgcaagaatattctcaggctccaggacctggtggacaaactgcaagcaaaggtgaaatcctacaagagacaagctgaagaagcggaggaacaatccaacgtcaacctctccaaattccgcaggatccagcacgagctggaggaggccgaggaacgggctgacattgctgagtcccaggtcaacaagctgagggtgaagagcagggaggttcacacaaaaatcataagtgaagagtaatttatctaactgctgaaaggtgaccaaagaaatgcacaaaatgtgaaaatctttgtcactccattttgtacttatgacttttggagataaaaaatttatctgcca

SEQ ID NO: 12720 - protein, 1939 aa, Homo sapiens
MSSDSEMAIFGEAAPFLRKSERERIEAQNKPFDAKTSVFVVDPKESFVKATVQSREGGKVTAKTEAGATVTVKDDQVFPMNPPKYDKIEDMAMMTHLHEPAVLYNLKERYAAWMIYTYSGLFCVTVNPYKWLPVYNAEVVTAYRGKKRQEAPPHIFSISDNAYQFMLTDRENQSILITGESGAGKTVNTKRVIQYFATIAVTGEKKKEEVTSGKMQGTLEDQIISANPLLEAFGNAKTVRNDNSSRFGKFIRIHFGTTGKLASADIETYLLEKSRVTFQLKAERSYHIFYQIMSNKKPDLIEMLLITTNPYDYAFVSQGEITVPSIDDQEELMATDSAIEILGFTSDERVSIYKLTGAVMHYGNMKFKQKQREEQAEPDGTEVADKAAYLQNLNSADLLKALCYPRVKVGNEYVTKGQTVQQVYNAVGALAKAVYDKMFLWMVTRINQQLDTKQPRQYFIGVLDIAGFEIFDFNSLEQLCINFTNEKLQQFFNHHMFVLEQEEYKKEGIEWTFIDFGMDLAACIELIEKPMGIFSILEEECMFPKATDTSFKNKLYEQHLGKSNNFQKPKPAKGKPEAHFSLIHYAGTVDYNIAGWLDKNKDPLNETVVGLYQKSAMKTLALLFVGATGAEAEAGGGKKGGKKKGSSFQTVSALFRENLNKLMTNLRSTHPHFVRCIIPNETKTPGAMEHELVLHQLRCNGVLEGIRICRKGFPSRILYADFKQRYKVLNASAIPEGQFIDSKKASEKLLGSIDIDHTQYKFGHTKVFFKAGLLGLLEEMRDEKLAQLITRTQAMCRGFLARVEYQKMVERRESIFCIQYNVRAFMNVKHWPWMKLYFKIKPLLKSAETEKEMANMKEEFEKTKEELAKTEAKRKELEEKMVTLMQEKNDLQLQVQAEADSLADAEERCDQLIKTKIQLEAKIKEVTERAEDEEEINAELTAKKRKLEDECSELKKDIDDLELTLAKVEKEKHATENKVKNLTEEMAGLDETIAKLTKEKKALQEAHQQTLDDLQAEEDKVNTLTKAKIKLEQQVDDLEGSLEQEKKIRMDLERAKRKLEGDLKLAQESTMDIENDKQQLDEKLKKKEFEMSGLQSKIEDEQALGMQLQKKIKELQARIEELEEEIEAERASRAKAEKQRSDLSRELEEISERLEEAGGATSAQIEMNKKREAEFQKMRRDLEEATLQHEATAATLRKKHADSVAELGEQIDNLQRVKQKLEKEKSEMKMEIDDLASNMETVSKAKGNLEKMCRALEDQLSEIKTKEEEQQRLINDLTAQRARLQTESGEYSRQLDEKDTLVSQLSRGKQAFTQQIEELKRQLEEEIKAKSALAHALQSSRHDCDLLREQYEEEQEAKAELQRAMSKANSEVAQWRTKYETDAIQRTEELEEAKKKLAQRLQDAEEHVEAVNAKCASLEKTKQRLQNEVEDLMIDVERTNAACAALDKKQRNFDKILAEWKQKCEETHAELEASQKESRSLSTELFKIKNAYEESLDQLETLKRENKNLQQEISDLTEQIAEGGKRIHELEKIKKQVEQEKSELQAALEEAEASLEHEEGKILRIQLELNQVKSEVDRKIAEKDEEIDQMKRNHIRIVESMQSTLDAEIRSRNDAIRLKKKMEGDLNEMEIQLNHANRMAAEALRNYRNTQAILKDTQLHLDDALRSQEDLKEQLAMVERRANLLQAEIEELRATLEQTERSRKIAEQELLDASERVQLLHTQNTSLINTKKKLETDISQIQGEMEDIIQEARNAEEKAKKAITDAAMMAEELKKEQDTSAHLERMKKNLEQTVKDLQHRLDEAEQLALKGGKKQIQKLEARVRELEGEVESEQKRNVEAVKGLRKHERKVKELTYQTEEDRKNILRLQDLVDKLQAKVKSYKRQAEEAEEQSNVNLSKFRRIQHELEEAEERADIAESQVNKLRVKSREVHTKIISEE

SEQ ID NO: 12721 - DNA, 3743 bp, Rattus norvegicus
  ref <308>: DATABASE ACCESSION NUMBER: EMBL / L26525
  ref <309>: DATABASE ENTRY DATE: 2000-03-04
aggacaaagggctgggggagtctacccccaactcctcctacctcctggggtgacccagcctccctatagtttaagcctgccctcacctccaaggcaactcagtcctctcagccctgggctcttctgctaccttggagatgctgtcccctcctccataggccagagggatcaggagcgatggggacagggaccctctcatctctcctgctgctgctactcttggtgacaattggagatgctgacatgaagggacattttgacccagccaagtgccgctatgccctgggcatgcaggaccgcaccattccagacagcgatatctctgtgtccagctcctggtcggactctaccgccgcccgccacagcaggctggaaagcagtgatggagatggggcttggtgccctgcagggcctgtgttccccaaagaagaggagtacctgcaggtggaccttcgtaggctacacctggtggctctggtgggcacccagggccgccatgctgggggtctgggcaaagagttctcccgaagctaccggttgcgttactcccgagatggccgacgatggatggactggaaagacagatggggtcaggaggtgatttcgggtaacgaggatcctgggggagtggtgctgaaggatctcgggccccccatggtggcccggctggtccgtttctaccccagggctgaccgggtcatgagtgtctgtcttcgggtggagctctatggctgcctctggcgggacggactcttgtcctatacagcccccgtggggcagaccatgcaattatctgagatggtgtatctcaatgattccacttacgatggatatactgctggagggctgcagtacggtggtctgggccaactggcagacggcgtggtggggctggatgatttcaggcagagccaggagctgcgggtttggccaggctatgactatgtgggatggagcaaccatagcttccccagcggctacgtggagatggagtttgagtttgatcggctgaggtctttccagaccatgcaggtccactgtaacaacatgcacactctgggagcccgcctcccaggcggggtggaatgccggtttaaaaggggtccggccatggcctgggaaggagagcctgtacaccatgccctggggggtagccttggagaccccagagccagggccatctcggtgcccctgggtggtcacgtgggccgcttcctgcagtgcagattcctctttgcaggaccctggttactcttcagtgagatctctttcatctcggatgtggtgaacgactcgtctgacaccttcccaccagccccctggtggccgcctggcccgcctcccaccaacttcagcagcttggagctggagccccggggtcaacagcctgtggccaaggcggaggggagcccaactgccatcctcattggctgcctggtggccatcatccttctcctcctccttatcattgccctgatgctctggaggctgcactggcgccggctgctcagcaaggcagagcgccgggtgttggaggaggagctgacggttcacctctctgtccctggggacaccatcctcatcaacaaccgcccagggccccgagagccacccccttaccaggaaccccggcctcgggggactccaactcactctgcgccctgcgtccccaatggctctgcgttgctgctctccaatccggcctaccgcctccttctggccacttacgcccgtccccctcgaggcccgggcccccccacacccgcctgggccaaacccaccaacacccaggcctgcagtggggactacatggagcccgagaagccgggcgccccacttctacccccacctccccagaacagcgtcccccattacgccgaggctgacattgtcaccctgcagggcgtcacagggggcaacacctacgctgttcccgcactgcccccaggggcggttggggatgggccccccagagtggatttccctcggtcacggctccgtttcaaggagaagctcggcgagggccaatttggggaggtacatctctgtgaagtagaggaccctcaagatctggtcactagtgacttccctatcagtgtgcaaaagggacaccccttgctggtggcagtgaagatcctccggccagatgccaccaaaaatgccaggaatgacttcctgaaggaggtaaagatcatgtcacggctgaaggacctaaacatcatcaggctcctgggtgtgtgtgtgcaggatgaccctctctgcatgattacagactacatggagaacggtgacctgaaccaattcctcagtgcccaccagctggagaacaaggtcactcaggggcttcctggggacagagagtctgaccaggggcccacaatcagctaccctatgctgttacacgtgggggcccagattgcctctggcatgcgatatctggccacccttaactttgtgcatcgggacctggccacccggaactgcttggttggggaaaatttcaccatcaaaatcgccgactttggcatgagccggaatctctacgctggggattattaccgtgtacagggccgggcagtgctgcccatcaggtggatggcctgggagtgtatcctcatggggaagttcacaacagccagtgatgtgtgggccttcggagtgaccctgtgggaggtgcttatgctctgcaggtcacagcccttcgggcaactcacagacgagcaggtcatcgagaacgccggcgagttcttcagggaccagggccggcaggtatacttatccaggccacccgcctgcccgcagaccttgtatgagctgatgctccggtgttggagccgggagccggagcagcggccgcccttctcccagcttcatcggttcctggcggatgatgcactcaacacagtgtaaactaaggacctggcagccctttttcactgggagccatccaggggaagctggacactaaaaccagagaagcctatggcaccccgcccaccatctccccgacttgcccattcccaagaggcagtgtctctgcaggtgggctgggcccgcccagggaaccgaagactctgttaccagatacgtgctcccttcctgttcttcctcccacctgccaagctccacccacccagctggccctgtggttgggatcctgcctgacttcttccagctatcccctagggaaagacaggggcgaatgctgggcacacactggacaaggcccactggacaacactggttcctgggaggtgacggtaccccccagcttcttcttgtcacacactggacaccgccagaattgagggggacgagggggacaaggaaggccaaccctctacaatggtcctcagccctggcttccttctgcaccctccgcctctgacacactggacctgggggtgacccctgctgtgatcctcagtcaaacacccctccttcctacctaccaccatgttgccgctagaacttccgcaaagcctctgcgttcctgtggagtaaatattaggatggggaacagatggagcagtagcccgaggccggggggtggggatttctcttgtagctaccacattggtttttctataatcacgtggggtttgtacattttttggggggagagacacagatttttacactaatatatggacctagctcgaggcagttttaatctcctgctctaggcaggtaataataaaagttgagttttttgtttttttttttcaaaaaaaaaaaaaccc

SEQ ID NO: 12722 - protein, 910 aa, Rattus norvegicus
  ref <308>: DATABASE ACCESSION NUMBER: SWISS-Prot / AAA21089
  ref <309>: DATABASE ENTRY DATE: 2002-06-15
MGTGTLSSLLLLLLLVTIGDADMKGHFDPAKCRYALGMQDRTIPDSDISVSSSWSDSTAARHSRLESSDGDGAWCPAGPVFPKEEEYLQVDLRRLHLVALVGTQGRHAGGLGKEFSRSYRLRYSRDGRRWMDWKDRWGQEVISGNEDPGGVVLKDLGPPMVARLVRFYPRADRVMSVCLRVELYGCLWRDGLLSYTAPVGQTMQLSEMVYLNDSTYDGYTAGGLQYGGLGQLADGVVGLDDFRQSQELRVWPGYDYVGWSNHSFPSGYVEMEFEFDRLRSFQTMQVHCNNMHTLGARLPGGVECRFKRGPAMAWEGEPVHHALGGSLGDPRARAISVPLGGHVGRFLQCRFLFAGPWLLFSEISFISDVVNDSSDTFPPAPWWPPGPPPTNFSSLELEPRGQQPVAKAEGSPTAILIGCLVAIILLLLLIIALMLWRLHWRRLLSKAERRVLEEELTVHLSVPGDTILINNRPGPREPPPYQEPRPRGTPTHSAPCVPNGSALLLSNPAYRLLLATYARPPRGPGPPTPAWAKPTNTQACSGDYMEPEKPGAPLLPPPPQNSVPHYAEADIVTLQGVTGGNTYAVPALPPGAVGDGPPRVDFPRSRLRFKEKLGEGQFGEVHLCEVEDPQDLVTSDFPISVQKGHPLLVAVKILRPDATKNARNDFLKEVKIMSRLKDLNIIRLLGVCVQDDPLCMITDYMENGDLNQFLSAHQLENKVTQGLPGDRESDQGPTISYPMLLHVGAQIASGMRYLATLNFVHRDLATRNCLVGENFTIKIADFGMSRNLYAGDYYRVQGRAVLPIRWMAWECILMGKFTTASDVWAFGVTLWEVLMLCRSQPFGQLTDEQVIENAGEFFRDQGRQVYLSRPPACPQTLYELMLRCWSREPEQRPPFSQLHRFLADDALNTV

SEQ ID NO: 12723 - DNA, 443 bp, Rattus norvegicus
  ref <308>: DATABASE ACCESSION NUMBER: EMBL / L26913
  ref <309>: DATABASE ENTRY DATE: 2000-03-04
atggcactctgggtgactgcagtcctggctctcgcttgccttggtggtcttgccaccccagggccagtgcggagatccacatctccccctgtggccctcagggagcttatcgaggagctgagcaacatcacacaagaccagaagacttccctgtgcaacagcagcatggtatggagcgtggacctgacagctggcgggttctgtgcagccctggaatccctgaccaacatctccagttgcaatgccatccacaggacccagaggatattgaatggcctctgtaaccaaaaggcctcggatgtggcttccagccccccagataccaaaatcgaagtagcccagtttatatcaaaactgctcaattactccaagcaacttttccgctatggccactgaggggagaccggccctggacatctcagctgtggacctcagttgtggat

SEQ ID NO: 12724 - protein, 131 aa, Rattus norvegicus
  ref <308>: DATABASE ACCESSION NUMBER: SWISS-Prot / AAA16478
  ref <309>: DATABASE ENTRY DATE: 1998-07-15
MALWVTAVLALACLGGLATPGPVRRSTSPPVALRELIEELSNITQDQKTSLCNSSMVWSVDLTAGGFCAALESLTNISSCNAIHRTQRILNGLCNQKASDVASSPPDTKIEVAQFISKLLNYSKQLFRYGH

SEQ ID NO: 12725 - DNA, 4740 bp, Homo sapiens
  ref <308>: DATABASE ACCESSION NUMBER: EMBL / U10307
  ref <309>: DATABASE ENTRY DATE: 2000-03-04
ggatccccgctgacaatctagaaacaagcaacaggaccctctgatgtagccatctgtgccgcgcctctccgcaccgcccgccacgccttggtccctggagaccaccctccagggcaggggctgccgctcggccgggcccgcggggtccctcggcctgacatggccggtgctggagcggcacgtgcgcgcctcggcccctcggccgctcccgcccctcgccggtgcgcaccggcgctcggggagccgctggcccgggtgtccagccggcccttgccctgcctggcgctcggaccgccacctttgccgccccctcgccagcctccgcagcttccagactggccggtctgcgcgcccacccctgcctcccggaccggccaccgccgaggcgcggaggagggcccggccgcgcagatcccgcttatcggcccatctcccgttacataaggccacccccctatctccgcgggccatcgccgccgcaaccgccgcgccagcgccttctcccacgcgcgggggcgcccctgcccaccgctcccggcagggcttttggtggccatgggggataaggggcgttgactcacccgggcggggctccgggagttgcacagaccaaggtagttccccgctccttcccccatcacggagaccctgtgggagatgccgtgggccctctactacagattaggaaacaggcccgtagaggggtcacacggccaagtagcggcactccaggcactgggggccctcgaggggaaggggcagacttctgggagtcagagccagcagctgggctgggaagcttcgagtgtggacagagagggtgggaatgacgttccctgtgggaagagagggtggcaagcctgggatgcctctgagcgggaatccagcatgccttgtgaggagggtcacaagcacacccttgtgaggaggttgagccccatcgaggacaggacggagggagcctgagcaggcagagagggggcctggggaggcgctggttcggggaggaagtgggtaggggagaaatcttgacatcaacacccaacaggcaaatgccgtggcctctgctgtgggggtttctggaggacttctaggaaaacgagggaagagcaggaaaaggcgacatgctgcagagactggtgagcaaaggggatcaccccaagccccagtggcactaggaacacttacaatctctgacctggactaaggctgccagctggcccagttaagagtttcccagaaggatggcccatacactttaaattaaaggggccagacacgtgcacactacttccagccactctggaagctgaggtggggggatcgcttgagtctgggagttggaggccagcctaggcaggcaacatagtgagaccccatctccaaaaaaacaaaacaaaacaaaacaaaaaaacaccaaaaaagctcccagaaagacctctgaatctttctggatctctcagtggagaccttggaaatctgaactttgacaatccctctcacagtggggccaaggaggaattaggcaagccaaaagaagtgaactttactcttctattgcctgtttgaattttgtatccaagcaagtgttacttaagtaatttaagagactggttcatcgaaaaaataaaactccccaaattcccatagctggtagactgtggtcacagccacagtgcactaagactatctgctcagcacttctggtgacccaaaagggtctgaggacaggagctcagagttgggtcagctgtccaggtactcagggttgtcacaggcaaaactgctggaactcagggcagcattgcaaatgccacgccgctctcagggccccttgcctgccgctggaattaaacccacccagatcttggaaactctgccctggacccttctcaataagtccatgagaaatcaaactctttcctttatgcgacactggattttccacaaagtaaaatcaagatgagtaaagatgtggtttctagatagtgcctgaaaaagcagagaccatggtgtcaggcgtcaccacttgggcctataaaagctgccacaagacgccaaggccacaagccacccagcctatgcatccgctcctcaatcctctcctgttggcactgggcctcatggcgcttttgttgaccacggtcattgctctcacttgccttggcggctttgcctccccaggccctgtgcctccctctacagccctcagggagctcattgaggagctggtcaacatcacccagaaccagaaggtgagtgtcggctagccagggtcctagctatgagggctccagggtgggtgattcccaagatgaggtcatgagcaggctgggcctggtcctaagatgcctgtaggtcaggaaaaatctccatggaccaaggcccggcccagccatgagggagagaggagctgggctggggggctcagcactgtggatggacctatggaggtgtctggcagactccccagggactacctgctctcctggcctggccttgtctgccactgccagctcctactcagccattcctgaacagaggacagcagagaagggtccagcaccctcccagaaccatgtggcatttgccaactggattttgaccataacaatgcagccattctccccagcaccatcataggcccgcccttacaggaggattcgttagtagagtcgctccttgccccactagtaacagctcacatgtcttgagcactgcttacaccaggcctggtgcacgtgctttatgtgtcatttcatcactgccagccacctcaagaggcaggtacgatgaacccattctgctaaggttcgtgaggttaagtgacagaggctggattcaagccaggcctggccaacaccagagtgtccatgctcctaactgcagtgttccctcaccatcagaaggcagggcatttaatacaccagatccccaccgcctcccatctgatttgtcttggtcaacatggcccaggccactcctacttcactcgtccccaccctgacccttcccgcaggcccctgtcctcctgccctgactatggcaagccttgcatgcagcttgtcccttactagtggtgtcaatttttttctctcagctccaagaccctaaacagtgggacctcacccctatgcctgctgttcaaagcagaaaacgaagctcaggaatgctgaggggctgccaggcctgcctctgtgccacaccagggatgcttgtggggcctgtgctggggcagacctggcctgggctgccagggcaggcccacaacccctgccagcactctgctcactgtcactttgctcccacagcgtccgctctgcaatggcagcatggtatggagcatcaacctgacagctggcatggtaaggacctttgggtgcagggaggatggggcagaggctccaggccttgggcttatcttctctgagcctcccttccatggctggggttccaagcaagcttcaagtgctctcctccctcccgccataatctggccccttcccgcccaccacccagactcacctgcgccaggcatctcagccccatcttcctgcagactcacaaaaggcagctgcccaagcagggcctgacccctcggtgtcccctccccacagtactgtgcagccctggaatccctgatcaacgtgtcaggctgcagtgccatcgagaagacccagaggatgctgagcggattctgcccgcacaaggtctcagctggggtaaggcatcccccaccctctcacacccaccctgcaccccctcctgccaaccctgggctcgctgaagggaagctggctgaatatccatggtgtgtgtccacccaggggtggggccattgtggcagcagggacgtggccttcgggatttacaggatctgggctcaagggctcctaactcctacctgggcctcaatttccacatctgtacagtagaggtactaacagtacccacctcatggggacttccgtgaggactgaatgagacagtccctggaaagcccctggtttgtgcgagtcgtcccggcctctggcgttctactcacgtgctgacctctttgtcctgcagcagttttccagcttgcatgtccgagacaccaaaatcgaggtggcccagtttgtaaaggacctgctcttacatttaaagaaactttttcgcgagggacggttcaactgaaacttcgaaagcatcattatttgcagagacaggacctgactattgaagttgcagattcatttttctttctgatgtcaaaaatgtcttgggtaggcgggaaggagggttagggaggggtaaaattccttagcttagacctcagcctgtgctgcccgtcttcagcctagccgacctcagccttccccttgcccagggctcagcctggtgggcctcctctgtccagggccctgagctcggtggacccagggatgacatgtccctacacccctcccctgccctagagcacactgtagcattacagtgggtgccccccttgccagacatgtggtgggacagggacccacttcacacacaggcaactgaggcagacagcagctcaggcacacttcttcttggtcttatttattattgtgtgttatttaaatgagtgtgtttgtcaccgttggggattggggaagactgtggctgctggcacttggagccaagggttcagagactcagggccccagcactaaagcagtggaccccaggagtccctggtaataagtactgtgtacagaattc

SEQ ID NO: 12726 - protein, 132 aa, Homo sapiens
  ref <308>: DATABASE ACCESSION NUMBER: SWISS-Prot / AAA83738
  ref <309>: DATABASE ENTRY DATE: 2002-06-15
MALLLTTVIALTCLGGFASPGPVPPSTALRELIEELVNITQNQKAPLCNGSMVWSINLTAGMYCAALESLINVSGCSAIEKTQRMLSGFCPHKVSAGQFSSLHVRDTKIEVAQFVKDLLLHLKKLFREGRFN

SEQ ID NO: 12727 - DNA, 13553 bp, Rattus norvegicus; identical to SEQ ID NO: 3108
  ref <308>: DATABASE ACCESSION NUMBER: EMBL / L27075
  ref <309>: DATABASE ENTRY DATE: 1999-06-29

SEQ ID NO: 12728 - DNA, 1910 bp, Rattus norvegicus; identical to SEQ ID NO: 3125
  ref <308>: DATABASE ACCESSION NUMBER: EMBL / L27651
  ref <309>: DATABASE ENTRY DATE: 1994-12-22

SEQ ID NO: 12729 - protein, 535 aa, Rattus norvegicus; identical to SEQ ID NO: 3126
  ref <308>: DATABASE ACCESSION NUMBER: SWISS-Prot / AAA57157
  ref <309>: DATABASE ENTRY DATE: 2003-02-01

SEQ ID NO: 12730 - DNA, 2136 bp, Homo sapiens
  ref <308>: DATABASE ACCESSION NUMBER: EMBL / AF097518
  ref <309>: DATABASE ENTRY DATE: 2000-03-03
ccacctccagagtccaagggtctatgtggtgggcagtttgagctggctggatactagagggaggctgcacctgaagcatttggtgggtgagcagcatgggctttgaggagctgctggagcaggtgggcggctttgggcccttccaactgcggaatgtggcactgctggccctgccccgagtgctgctaccactgcacttcctcctgcccatcttcctggctgccgtgcctgcccaccgatgtgccctgccgggtgcccctgccaacttcagccatcaggatgtgtggctggaggcccatcttccccgggagcctgatggcacgctcagctcctgcctccgctttgcctatccccaggctctccccaacaccacgttgggggaagaaaggcagagccgtggggagctggaggatgaacctgccacagtgccctgctctcagggctgggagtacgaccactcagaattctcctctaccattgcaactgagtcccagtgggatctggtgtgtgagcagaaaggtctgaacagagctgcgtccactttcttcttcgccggtgtgctggtgggggctgtggcctttggatatctgtccgacaggtttgggcggcggcgtctgctgctggtagcctacgtgagtaccctggtgctgggcctggcatctgcagcctccgtcagctatgtaatgtttgccatcacccgcacccttactggctcagccctggctggttttaccatcatcgtgatgccactggagctggagtggctggatgtggagcaccgcaccgtggctggagtcctgagcagcaccttctggacagggggcgtgatgctgctggcactggttgggtacctgatacgggactggcgatggcttctgctagctgtcaccctgccttgtgccccaggcatcctcagcctctggtgggtgcctgagtctgcacgctggcttctgacccaaggccatgtgaaagaggcccacaggtacttgctccactgtgccaggctcaatgggcggccagtgtgtgaggacagcttcagccaggaggctgtgagcaaagtggccgccggggaacgggtggtccgaagaccttcatacctagacctgttccgcacaccacggctccgacacatctcactgtgctgcgtggtggtgtggttcggagtgaacttctcctattacggcctgagtctggatgtgtcggggctggggctgaacgtgtaccagacacagctgttgttcggggctgtggaactgccctccaagctgctggtctacttgtcggtgcgctacgcaggacgccgcctcacgcaagccgggacactgctgggcacggccctggcgttcggcactagactgctagtgtcctccgatatgaagtcctggagcactgtcctggcagtgatggggaaagctttttctgaagctgccttcaccactgcttacctgttcacttcagagttgtaccctacggtgctcagacagacagggatggggctgactgcactggtgggccggctggggggctctttggccccactggcggccttgctagatggagtgtggctgtcactgcccaagcttacttatggggggatcgccctgctggctgccggcaccgccctcctgctgccagagacgaggcaggcacagctgccagagaccatccaggacgtggagagaaagagtgccccaaccagtcttcaggaggaagagatgcccatgaagcaggtccagaactaagtgggagtggaggcaggccctccacagaagctctgcagcaggggctgggagagcagaagggcaggcccttcaactcaggctgggagagcagaagggcaggccctgcaactcaggctgggagtatcgaaccctctgcctagggccggagttgctgccagtacccgctccctctgctcatccatccttgattatttggcttctaggaacagttgacttcccagaatgcagtgggctgctgggcacccctctcacggttggggaggattctgtaaataaaggtgccccttgggttggggcagtggtgacgagctgtgggaagagccctggataggaagccactgagtctgccctgggctctgataaaacttcaccattaaaaaaaaaaaaaaaaaaa

SEQ ID NO: 12731 - protein, 548 aa, Homo sapiens; identical to SEQ ID NO: 3128
  ref <308>: DATABASE ACCESSION NUMBER: SWISS-Prot / AAD37091
  ref <309>: DATABASE ENTRY DATE: 2003-02-01

SEQ ID NO: 12732 - DNA, 1910 bp, Rattus norvegicus; identical to SEQ ID NO: 3125
  ref <308>: DATABASE ACCESSION NUMBER: EMBL / L27651
  ref <309>: DATABASE ENTRY DATE: 1994-12-22

SEQ ID NO: 12733 - protein, 535 aa, Rattus norvegicus; identical to SEQ ID NO: 3126
  ref <308>: DATABASE ACCESSION NUMBER: SWISS-Prot / AAA57157
  ref <309>: DATABASE ENTRY DATE: 2003-02-01

SEQ ID NO: 12734 - DNA, 2136 bp, Homo sapiens; identical to SEQ ID NO: 12730
  ref <308>: DATABASE ACCESSION NUMBER: EMBL / AF097518
  ref <309>: DATABASE ENTRY DATE: 2000-03-03

SEQ ID NO: 12735 - protein, 548 aa, Homo sapiens; identical to SEQ ID NO: 3128
  ref <308>: DATABASE ACCESSION NUMBER: SWISS-Prot / AAD37091
  ref <309>: DATABASE ENTRY DATE: 2003-02-01

SEQ ID NO: 12736 - DNA, 2106 bp, Rattus norvegicus; identical to SEQ ID NO: 3168
  ref <308>: DATABASE ACCESSION NUMBER: EMBL / L31619
  ref <309>: DATABASE ENTRY DATE: 2002-02-11

SEQ ID NO: 12737 - protein, 502 aa, Rattus norvegicus; identical to SEQ ID NO: 3169
  ref <308>: DATABASE ACCESSION NUMBER: SWISS-Prot / AAC33136
  ref <309>: DATABASE ENTRY DATE: 2002-06-15

SEQ ID NO: 12738 - DNA, 2155 bp, Homo sapiens
  ref <308>: DATABASE ACCESSION NUMBER: Refseq / NM_000746
  ref <309>: DATABASE ENTRY DATE: 2002-11-05
ggccgcaggcgcaggcccgggcgacagccgagacgtggagcgcgccggctcgctgcagctccgggactcaacatgcgctgctcgccgggaggcgtctggctggcgctggccgcgtcgctcctgcacgtgtccctgcaaggcgagttccagaggaagctttacaaggagctggtcaagaactacaatcccttggagaggcccgtggccaatgactcgcaaccactcaccgtctacttctccctgagcctcctgcagatcatggacgtggatgagaagaaccaagttttaaccaccaacatttggctgcaaatgtcttggacagatcactatttacagtggaatgtgtcagaatatccaggggtgaagactgttcgtttcccagatggccagatttggaaaccagacattcttctctataacagtgctgatgagcgctttgacgccacattccacactaacgtgttggtgaattcttctgggcattgccagtacctgcctccaggcatattcaagagttcctgctacatcgatgtacgctggtttccctttgatgtgcagcactgcaaactgaagtttgggtcctggtcttacggaggctggtccttggatctgcagatgcaggaggcagatatcagtggctatatccccaatggagaatgggacctagtgggaatccccggcaagaggagtgaaaggttctatgagtgctgcaaagagccctaccccgatgtcaccttcacagtgaccatgcgccgcaggacgctctactatggcctcaacctgctgatcccctgtgtgctcatctccgccctcgccctgctggtgttcctgcttcctgcagattccggggagaagatttccctggggataacagtcttactctctcttaccgtcttcatgctgctcgtggctgagatcatgcccgcaacatccgattcggtaccattgatagcccagtacttcgccagcaccatgatcatcgtgggcctctcggtggtggtgacggtgatcgtgctgcagtaccaccaccacgaccccgacgggggcaagatgcccaagtggaccagagtcatccttctgaactggtgcgcgtggttcctgcgaatgaagaggcccggggaggacaaggtgcgcccggcctgccagcacaagcagcggcgctgcagcctggccagtgtggagatgagcgccgtggcgccgccgcccgccagcaacgggaacctgctgtacatcggcttccgcggcctggacggcgtgcactgtgtcccgacccccgactctggggtagtgtgtggccgcatggcctgctcccccacgcacgatgagcacctcctgcacggcgggcaaccccccgagggggacccggacttggccaagatcctggaggaggtccgctacattgccaaccgcttccgctgccaggacgaaagcgaggcggtctgcagcgagtggaagttcgccgcctgtgtggtggaccgcctgtgcctcatggccttctcggtcttcaccatcatctgcaccatcggcatcctgatgtcggctcccaacttcgtggaggccgtgtccaaagactttgcgtaaccacgcctggttctgtacatgtggaaaactcacagatgggcaaggcctttggcttggcgagatttgggggtgctaatccaggacagcattacacgccacaactccagtgttcccttctggctgtcagtcgtgttgcttacggtttctttgttactttaggtagtagaatctcagcactttgtttcatattctcagatgggctgatagatatccttggcacatccgtaccatcggtcagcagggccactgagtagtcattttgcccattagcccactgcctggaaagcccttcggagagctccccatggctcctcaccaccgagacagttggttttgcatgtctgcatgaaggtctacctgaaaattcaacatttgctttttgcttgtgtacaaacccagattgaagctaaaataaaccagactcactaaatcctttccaataattgactggtggaaggaaaacaaaaaacaaaaactaaaaacctcttagcttttctgcaattcaactttttatttttatttttatttctatcaaagacggtagagagaaacagcttgatgctgtttctacatt

SEQ ID NO: 12739 - protein, 502 aa, Homo sapiens; identical to SEQ ID NO: 3171
  ref <308>: DATABASE ACCESSION NUMBER: Refseq / NP_000737
  ref <309>: DATABASE ENTRY DATE: 2002-11-05

SEQ ID NO: 12740 - DNA, 1215 bp, Rattus norvegicus
  ref <308>: DATABASE ACCESSION NUMBER: EMBL / L32601
  ref <309>: DATABASE ENTRY DATE: 2000-03-04
ggcacgagagaaagcgactcttctagggaagagcagcatctgagaatgaattccaaaattcagaagatggagttaaacgatggtcactccatccctgtactgggctttggcacctatgcaaccgaagagaatctcagaaaaaagtctatggagtccacgaaaatagctatagatgttgggttccgccatattgattgttctcacttgtaccagaatgaagaagagataggtcaggccattgtaagcaagattgaagatggcactgtgaaaagggaagatatattctatacttcaaagctttggtcaacttcccatcgtccagagttggtcagacccagcttggaaaattcactgaggaaacttaatttggactatgtagacctctatctcattcatttcccggtatctctgaagccaggggatgagcttttacctcaagatgagcatggaaacttaatacttgacacagtggatctctgcgacacctgggaggccatggagaagtgtaaggatgcaggattggccaagtccatcggggtgtccaactttaaccgcaggcagctggagaagatcctgaataagccggggctcaagcacaggcctgtgtgcaaccaggtagaatgccatctttatctcaaccagagcaagctgctcgcttactgcaagatgaatgacatcgttctggttgcctatggtgccctgggaactcagagatacaaatactgtattaatgaagataccccagttctcttggatgatcccattctttgtaccatggcaaagaagtacaagcggactccagccctgattgcccttcgctaccagctggagcgtgggattgtgaccctagtcaagagtttcaatgaggagagaatcagagagaacctgcaggtctttgatttccagttggcttcagatgacatggaaattttagataacctggacagaaatcttcggtactttcctgctaatatgtttaaggctcaccctaactttccattctctgatgaatactaagatggcagccctagccatgagttctgctcgaagctcctttgtgtgatgctcgactctcagaggccaataatacaacacactgactccaatccatactgcttagcaactcacccccagtttgagctgtgtctgtacatcggggagcaaattcactaaattttcctgcttttctgtaaataaataaaaatattttgcttc

SEQ ID NO: 12741 - protein, 323 aa, Rattus norvegicus; identical to SEQ ID NO: 2376
  ref <308>: DATABASE ACCESSION NUMBER: SWISS-Prot / P51652
  ref <309>: DATABASE ENTRY DATE: 2002-06-15

SEQ ID NO: 12742 - DNA, 1204 bp, Homo sapiens; identical to SEQ ID NO: 2377
  ref <308>: DATABASE ACCESSION NUMBER: EMBL / D17793
  ref <309>: DATABASE ENTRY DATE: 2002-05-29

SEQ ID NO: 12743 - protein, 323 aa, Homo sapiens; identical to SEQ ID NO: 2378
  ref <308>: DATABASE ACCESSION NUMBER: SWISS-Prot / P42330
  ref <309>: DATABASE ENTRY DATE: 2002-06-15

SEQ ID NO: 12744 - DNA, 560 bp, Rattus norvegicus; identical to SEQ ID NO: 3219
  ref <308>: DATABASE ACCESSION NUMBER: EMBL / L35921
  ref <309>: DATABASE ENTRY DATE: 2000-03-04

SEQ ID NO: 12745 - protein, 70 aa, Rattus norvegicus; identical to SEQ ID NO: 3220
  ref <308>: DATABASE ACCESSION NUMBER: SWISS-Prot / AAA73553
  ref <309>: DATABASE ENTRY DATE: 2002-06-15

SEQ ID NO: 12746 - DNA, 213 bp, Homo sapiens; identical to SEQ ID NO: 3221
  ref <308>: DATABASE ACCESSION NUMBER: Refseq / NM_033258
  ref <309>: DATABASE ENTRY DATE: 2002-11-12

SEQ ID NO: 12747 - protein, 70 aa, Homo sapiens; identical to SEQ ID NO: 3222
  ref <308>: DATABASE ACCESSION NUMBER: Refseq / NP_150283
  ref <309>: DATABASE ENTRY DATE: 2002-11-12

SEQ ID NO: 12748 - DNA, 690 bp, Rattus norvegicus
  ref <308>: DATABASE ACCESSION NUMBER: EMBL / L47281
  ref <309>: DATABASE ENTRY DATE: 2000-03-04
acaagaatgagaggcttcatcttcactcgacacagtcaaaccacagccaatccttcatgccctgaaggaacacagccactctacagtgggttttcccttcttttcgtacaaggaaatgagcacgcccatggacaagaccttggtactctgggcagctgcttacagcgattcaccacaatgccattcttattctgtaacgtcgataacgtgtgtaactttgcatcacgaaatgattattcatactggctgtcgacaccagccccgatgcccatggacatggccccaattactggcagagcccttgagccctacgttagcagatgtaccgtctgcgaaggtcctgcaatggctatagctgttcacagtcaaaccactgctatccccccatgtccccagggctgggtttctctctggaaaggtttttctttcgttatgtttacaagtgcaggctctgagggtgctggacaagctcttgcctcgcccggctcctgcctggaggaattccgagccagtccatttatagaatgccatggacgagggacctgcaactactactcaaactcttacagcttctggctggcttcactaaatccagaaagaatgttcagaaaacctattccatcgactgtgaaagctggagacttggagaaaatcataagccgctgtcaggtgtgcatgaagaaaagacac

SEQ ID NO: 12749 - protein, 230 aa, Rattus norvegicus
  ref <308>: DATABASE ACCESSION NUMBER: SWISS-Prot / AAB72238
  ref <309>: DATABASE ENTRY DATE: 2003-02-01
TRMRGFIFTRHSQTTANPSCPEGTQPLYSGFSLLFVQGNEHAHGQDLGTLGSCLQRFTTMPFLFCNVDNVCNFASRNDYSYWLSTPAPMPMDMAPITGRALEPYVSRCTVCEGPAMAIAVHSQTTAIPPCPQGWVSLWKGFSFVMFTSAGSEGAGQALASPGSCLEEFRASPFIECHGRGTCNYYSNSYSFWLASLNPERMFRKPIPSTVKAGDLEKIISRCQVCMKKRH

SEQ ID NO: 12750 - DNA, 8050 bp, Homo sapiens
  ref <308>: DATABASE ACCESSION NUMBER: Refseq / NM_000091
  ref <309>: DATABASE ENTRY DATE: 2001-05-22
gggagggacgaaccgcgcgaccgagccctacaaaacccgccccggccgagtggcgaggcgagctttccagccgggctcccagagcgcgctgcgcaggagacgcggtggcctgagagcctgagggtccccggactcgcccaggctctgagctctctcccaccatgagcgcccggaccgcccccaggccgcaggtgctcctgctgccgctcctgctggtgctcctggcggcggcgcccgcagccagcaagggttgtgtctgtaaagacaaaggccagtgcttctgtgacggggccaaaggggagaagggggagaagggctttcctggaccccccggttctcctggccagaaaggattcacaggtcctgaaggcttgcctggaccgcagggacccaagggctttccaggacttccaggactcacgggttccaaaggtgtaaggggaataagtggattgccaggattttctggttctcctggacttccaggcaccccaggcaataccgggccttacggacttgtcggtgtaccaggatgcagtggttctaagggtgagcaggggtttccaggactcccagggacaccgggctacccagggatcccgggtgctgctggtttgaaaggacaaaagggtgctcctgctaaaggagaagatatagaacttgatgcaaaaggcgaccccgggttgccaggggctccaggaccccagggtttgccaggccctccaggttttcctgggcctgttggcccacctggtcctccgggattctttggctttccaggagccatgggacctagaggacctaagggtcacatgggtgaaagagtgataggacataaaggagagcggggtgtgaaagggttaacaggacccccgggaccaccaggaacagttattgtgaccctaactggcccagataacagaacggacctcaagggggaaaagggagacaagggagcaatgggcgagcctggacctcctggaccctcaggactgcctggagaatcatatggatctgaaaagggtgctcctggagaccctggcctgcagggaaaacccggaaaagatggtgttcctggcttccctggaagtgagggagtcaagggcaacaggggtttccctgggttaatgggtgaagatggcattaagggacagaaaggggacattggccctccaggatttcgtggtccaacagaatattatgacacataccaggaaaagggagatgaaggcactccaggcccaccagggcccagaggagctcgtggcccacaaggtcccagtggtccccccggagttcctggaagtcctggatcatcaaggcctggcctcagaggagcccctggatggccaggcttgaaaggaagtaaaggggaacgaggccgcccaggaaaggatgccatggggactcctgggtccccaggttgtgctggttcaccaggtcttccaggatcaccgggacctccaggaccgccaggtgacatcgtttttcgcaagggtccacctggagatcacggactgccaggctatctagggtctccaggaatcccaggagttgatgggcccaaaggagaaccaggcctcctgtgtacacagtgcccttatatcccagggcctcccggtctcccaggattgccagggttacatggtgtaaaaggaatcccaggaagacaaggcgcagctggcttgaaaggaagcccagggtccccaggaaatacaggtcttccaggatttccaggtttcccaggtgcccagggtgacccaggacttaaaggagaaaaaggtgaaacacttcagcctgaggggcaagtgggtgtcccaggtgacccggggctcagaggccaacctgggagaaagggcttggatggaattcctggaactctgggagtgaaaggattaccaggacctaaaggcgaactggctctgagtggtgagaaaggggaccaaggtcctccaggggatcctggctcccctgggtccccaggacctgcaggaccagctggaccacctggctacggaccccaaggagaacctggtctccagggcacgcaaggagttcctggggcccccggaccacccggagaagccggccctaggggagagctcagtgtttcaacaccagttccaggccctccaggacctccagggccccctggccatcctggcccccaaggtccacctggtatccctggatccctggggaaatgtggagatcctggtcttccagggcctgatggtgaaccaggaattccaggaattggatttcctgggccacctggacctaagggagaccaaggttttccaggtacaaaaggatcactgggttgtcctggaaaaatgggagagcctgggttacctggaaagccaggcctcccaggagccaagggagaaccagcagtagccatgcctggaggaccaggaacaccaggttttccaggagaaagaggcaattctggggaacatggagaaattggactccctggacttccaggtctccctggaactccaggaaatgaagggcttgatggaccacgaggagatccagggcagcctggaccacctggagaacaaggacccccaggaaggtgcatagagggtcccaggggagcccaaggacttccaggcttaaatggattgaaagggcaacaaggcagaagaggtaaaacggggccaaagggagacccaggaattccaggcttggatagatcaggatttcctggagaaactggatcaccaggaattccaggtcatcaaggtgaaatgggaccactgggtcaaagaggatatccaggaaatccgggaattttagggccaccaggtgaagatggagtgattgggatgatgggatttcctggagccattggccctccagggccccctgggaacccaggcacaccagggcagagggggagccctggaattccaggagtaaagggccagagaggaaccccaggagccaagggggaacaaggagataaaggaaatcccgggccttcagagatatcccacgtaataggggacaaaggagaaccaggtctcaaaggattcgcaggaaatccaggtgagaaaggaaacagaggcgttccagggatgccaggtttaaagggcctcaaaggactacccggaccagcaggaccaccaggccccagaggagatttgggcagcactgggaatcctggagaaccaggactccgtggtataccaggaagcatggggaacatgggcatgccaggttctaaaggaaaaaggggaactttgggattcccaggtcgagcaggaagaccaggcctcccaggtattcatggtctccagggagataagggagagccaggttattcagaaggtacaaggccaggaccaccgggaccaacgggggatccaggactgccgggtgatatgggaaagaaaggagaaatggggcaacctggcccacctggacatttggggcctgctggacctgagggagcccctggaagtcctggaagtcctggcctcccaggaaagccaggtcctcatggtgatttgggttttaaaggaatcaaaggcctcctgggccctccaggaatcagaggccctccaggtcttccaggatttccaggatctcctggaccaatgggtataagaggtgaccaaggacgtgatggaattcctggtccagccggagaaaagggagaaacgggtttattgagggcccctccaggcccaagagggaaccctggtgctcaaggagccaaaggagacaggggagccccaggttttcctggcctcccgggcagaaaaggggccatgggagatgctggacctcgaggacccacaggcatagaaggattcccagggccaccaggtctgcccggtgcaattatccctggccagacaggaaatcgtggtccaccaggctcaagaggaagcccaggtgcgcctggtccccctggacctccagggagtcatgtaataggcataaaaggagacaaagggtctatgggccaccctggcccaaaaggtccacctggaactgcaggagacatgggaccaccaggtcgtctgggagcaccaggtactccaggtcttccaggacccagaggtgatcctggattccaggggtttccaggcgtgaaaggagaaaagggtaatcctggatttctaggatccattggacctccaggaccaattgggccaaaaggaccacctggtgtacgtggagaccctggcacacttaagattatctcccttccaggaagcccagggccacctggcacacctggagaaccagggatgcagggagaacctgggccaccagggccacctggaaacctaggaccctgtgggccaagaggtaagccaggcaaggatggaaaaccaggaactcctggaccagctggagaaaaaggcaacaaaggttctaaaggagagccaggaccagctggatcagatggattgccaggtttgaaaggaaaacgtggagacagtggatcacctgcaacctggacaacgagaggctttgtcttcacccgacacagtcaaaccacagcaattccttcatgtccagaggggacagtgccactctacagtgggttttcttttctttttgtacaaggaaatcaacgagcccacggacaagaccttggaactcttggcagctgcctgcagcgatttaccacaatgccattcttattctgcaatgtcaatgatgtatgtaattttgcatctcgaaatgattattcatactggctgtcaacaccagctctgatgccaatgaacatggctcccattactggcagagcccttgagccttatataagcagatgcactgtttgtgaaggtcctgcgatcgccatagccgttcacagccaaaccactgacattcctccatgtcctcacggctggatttctctctggaaaggattttcattcatcatgttcacaagtgcaggttctgagggcaccgggcaagcactggcctcccctggctcctgcctggaagaattccgagccagcccatttctagaatgtcatggaagaggaacgtgcaactactattcaaattcctacagtttctggctggcttcattaaacccagaaagaatgttcagaaagcctattccatcaactgtgaaagctggggaattagaaaaaataataagtcgctgtcaggtgtgcatgaagaaaagacactgaagctaaaaaagacatgcagaactgctatttttcatcctaaagaacaaagtaatgacagaacatgctgttatttaggtatttttctttaaccaaacaatattgctccatgatgacttagtacaaagtttcaatttgtttccccacaaaacaaagcaattctttcaagtgcagttctgtgatctgggtctctaatctgtgctgtttcaaagttctctgtggcaaagcagcaactattcacaaaatatcaccaaaaacctattccacttacatccaaggcactgtcactacggtgattgtatgaagtttgaatgctgcacgttatgaaatatttggcccgctggattcccacatttgtcttctttctgtctttaagactcagggaggctaaatcagtgtttgattgccccgccaacccttcctgaaacttcagaccctgggtagggaagagaaggggcatgtggtatctggagcattgtgtatagaactggattttcagacctgctgaggaccgtaaggcctgatggaacacagaactgaactgaggttcatggattttccaggactgtttcaaacatgcccattactaacggcaaaagggggattccctgatggaaccataatacccttggaaatactgtatggttttgttttgttttgttggtttttaaagatttttgtttgtttattgaattcattcactgtagctctaaaatctgcttgtatccaagcatataaaattttcccccttagtgaattagttttaaaatgatattgttatatacatactatgaaatatgtataactttaacttctgttttaccagcatacgcacacaaataacaagaatactacttatgaaatgtgcactttatcctcattccataaatgttggtgcataccttatgtaagggagcagttcaataatccatgaaagaacttaaggcatttgttggtttatcagactcggaatctatttttctcattgctctgaatatgtcatcactctaggttttacagatttattcctttgttacttctctaattcttcctttgtaaaaaaaaaaaaagcaacacttttttttatgttatatgttgtcttacaaaccatactgaaagagtcattgtttaaaatcttaatgtatcaaactgtataacttggccgctgtatgtcttaaaacctgcttttcaatgtgttgatacattcccaaggttacttaattcaacttaactatcatgttattcagcaccaagcatgtccaggcactgtactaacctacagagatgctaagagaaaaaaaagacttgtttctgatctaatatccagaaaaagtaactcattgctctgtaataatctcacatatacagtagcttcctccctctagttttttcttccttgtcactgctgttatatttcatcatgataattcagcaggccagtaaggtaaaaataaggtctatgcctagggaaactcaggcttctagtttctcttagaaaagctaagagaagataaggtctgaataatagcagaaaaaccaacatctacaaaacattaaactagtgttataccttgatgataacactattgatgagtcttagagtccagacacaaagagacaaagctttgaagatgcttttgatctacctaggtggagttggtggtgctgatatttaaattcaggctactgcttcaatctcaattgctttgtaagtgaaaacatgacccagagacagacagactatggccatggctcacatggtttacatccttcactgctcacgtgtttgctgtcaagccatttttacagtctgaaactaagatgtgcagcatttcacttatttagattcacttaacaaacaaatttttctgctttaaaaatgtcttattgtcccaaggtactatagcggatatagagctagctaatctctacaaaccctctgtaggccagtagttctcaaagtgtggtctctggaagagcagtatcagcatcatctgggaacttgtcacagatgcagattctagggaccactccagacctacagaatcagaaactcttgggggagggcccgaaatatctatgttttaccaagcccaccacatgattctgatgtactctaaatactgagaaaacctgttctatcaatccaagcacactccgcaggcagttaccagtacggctggctacaactgctccatccgtgcctctttttaaagttcaaactcacaggtgactctaaggttatctacttttactcataagtaaaagccctagactggtgctaatgtcaaaccactggcctccactcaggcctccatcttctcatgccctcttaccagtatttaacttctgaggaagacaagtgatgctaaaacctgaattccaatgaagccatatgaaccagctgtcagttgcacttctaagactttacttagcagtaaattatagctcatgtgcattatttcagatacttagcttatgagtagcttatacaattagtgaagattaatattacagattaaatgtaactgttcttaaattgggctcacttgattcacagcgtgcatacacagattgtgagaagtcttcagcaagataaacattattaactaacttatttatgaagtattaaaatgcttacatttgaacttgatggctaacttactaagattctctatgtatcaaatgtaacttactgcgactaaacttaatttaatatttactctataaccaaatgaaatatatttaaaatatattgaatattttatattgttatatcctgacaagattgttaatattttaatgtactaatatttctgtcaattatatctaaatattattttattatattgcctaagaataaacatttgttaaattgg

SEQ ID NO: 12751 - protein, 1670 aa, Homo sapiens
  ref <308>: DATABASE ACCESSION NUMBER: Refseq / NP_000082
  ref <309>: DATABASE ENTRY DATE: 2001-05-22
MSARTAPRPQVLLLPLLLVLLAAAPAASKGCVCKDKGQCFCDGAKGEKGEKGFPGPPGSPGQKGFTGPEGLPGPQGPKGFPGLPGLTGSKGVRGISGLPGFSGSPGLPGTPGNTGPYGLVGVPGCSGSKGEQGFPGLPGTPGYPGIPGAAGLKGQKGAPAKGEDIELDAKGDPGLPGAPGPQGLPGPPGFPGPVGPPGPPGFFGFPGAMGPRGPKGHMGERVIGHKGERGVKGLTGPPGPPGTVIVTLTGPDNRTDLKGEKGDKGAMGEPGPPGPSGLPGESYGSEKGAPGDPGLQGKPGKDGVPGFPGSEGVKGNRGFPGLMGEDGIKGQKGDIGPPGFRGPTEYYDTYQEKGDEGTPGPPGPRGARGPQGPSGPPGVPGSPGSSRPGLRGAPGWPGLKGSKGERGRPGKDAMGTPGSPGCAGSPGLPGSPGPPGPPGDIVFRKGPPGDHGLPGYLGSPGIPGVDGPKGEPGLLCTQCPYIPGPPGLPGLPGLHGVKGIPGRQGAAGLKGSPGSPGNTGLPGFPGFPGAQGDPGLKGEKGETLQPEGQVGVPGDPGLRGQPGRKGLDGIPGTLGVKGLPGPKGELALSGEKGDQGPPGDPGSPGSPGPAGPAGPPGYGPQGEPGLQGTQGVPGAPGPPGEAGPRGELSVSTPVPGPPGPPGPPGHPGPQGPPGIPGSLGKCGDPGLPGPDGEPGIPGIGFPGPPGPKGDQGFPGTKGSLGCPGKMGEPGLPGKPGLPGAKGEPAVAMPGGPGTPGFPGERGNSGEHGEIGLPGLPGLPGTPGNEGLDGPRGDPGQPGPPGEQGPPGRCIEGPRGAQGLPGLNGLKGQQGRRGKTGPKGDPGIPGLDRSGFPGETGSPGIPGHQGEMGPLGQRGYPGNPGILGPPGEDGVIGMMGFPGAIGPPGPPGNPGTPGQRGSPGIPGVKGQRGTPGAKGEQGDKGNPGPSEISHVIGDKGEPGLKGFAGNPGEKGNRGVPGMPGLKGLKGLPGPAGPPGPRGDLGSTGNPGEPGLRGIPGSMGNMGMPGSKGKRGTLGFPGRAGRPGLPGIHGLQGDKGEPGYSEGTRPGPPGPTGDPGLPGDMGKKGEMGQPGPPGHLGPAGPEGAPGSPGSPGLPGKPGPHGDLGFKGIKGLLGPPGIRGPPGLPGFPGSPGPMGIRGDQGRDGIPGPAGEKGETGLLRAPPGPRGNPGAQGAKGDRGAPGFPGLPGRKGAMGDAGPRGPTGIEGFPGPPGLPGAIIPGQTGNRGPPGSRGSPGAPGPPGPPGSHVIGIKGDKGSMGHPGPKGPPGTAGDMGPPGRLGAPGTPGLPGPRGDPGFQGFPGVKGEKGNPGFLGSIGPPGPIGPKGPPGVRGDPGTLKIISLPGSPGPPGTPGEPGMQGEPGPPGPPGNLGPCGPRGKPGKDGKPGTPGPAGEKGNKGSKGEPGPAGSDGLPGLKGKRGDSGSPATWTTRGFVFTRHSQTTAIPSCPEGTVPLYSGFSFLFVQGNQRAHGQDLGTLGSCLQRFTTMPFLFCNVNDVCNFASRNDYSYWLSTPALMPMNMAPITGRALEPYISRCTVCEGPAIAIAVHSQTTDIPPCPHGWISLWKGFSFIMFTSAGSEGTGQALASPGSCLEEFRASPFLECHGRGTCNYYSNSYSFWLASLNPERMFRKPIPSTVKAGELEKIISRCQVCMKKRH

SEQ ID NO: 12752 - DNA, 1738 bp, Rattus norvegicus
  ref <308>: DATABASE ACCESSION NUMBER: EMBL / L81136
  ref <309>: DATABASE ENTRY DATE: 2000-03-04
ccaaggaggacaccagcagcaggagcagcagcacggagccatcaatcacaactggggttagaggcacatctgagtcccatgggctgtgtggactttataacccatgaccgtgtcgacactgcttggttccccaggatcacacaaccaaatgggaatgagaactgccatctgtcagcagtgccctggctgaaggaccttacacagtttaggagcaaaagtgaagcaggggaaactgggaatgcccttctctcttccccacctgactggacctgcagactaaaagtttgccccgacacgtaaaatgagaatacctggataagaagttaaggatactgcctggtgcttcttgttgggaaaacaccaaatgggggatgactcaggtacagcaggagggcccagagtccctgggggcccaggattaggaggctgtggtggcttctgcaaaggattctaagggctgttaggggacaaccatggcagttgcttcaggtctcattggaggtagagctgaagaggcatggatcttctccaatctgggcccctggttaaggacatgaataccaagtctttggagaagatctacctgttctccccacccattaaggagtctgagattattgactttttcaggggtgcatccctaaggatgaggttctgaaaatcatgccagtgcagaagcagactgtgggtgggcagctgaccaggttcaaggtttttgttgctattggggactacagtggccaagttggtcttggcattaagtgctccaaggagcttgcctctgccatccaaggggtcaccatcctggtcaagctttcaatcatcctggcgaggagaagctatggggaacaagattgggaagacccacactatcctgtgcatggtgacaggctgctgtggctctgtgctggtgcatctcatccctgcccacagagcactggcatttcctctgctcctgtacccacgaagccactgatgatggcaggtatagatgactgctacacttcaggcaggggctgtgctgccatcctggactactttgccaaggccacctttgatgccatcttcaagacctacagctacctgacccgcacccgacctctggaacattgataccctggcaggagatcacctccaaagtcttctaggtctgtaagatccatcagaaataaagacaggaccttaataccaagagacacaggcaagcaaatctcagagtttaacgccagttgatacagagctaatttcagttaaagaaaagcttaggttctggtattgtggtacacacctttaattccaaagaatgaaggtaaagtgaggttgtagaaggacgccctcctgtttgaacgtgatgtgctattgagtggcaggaaaggtgacacatcagagaaagatttgagaatataggatgtgcccaattctctgaagaatagagaagaaagggagctactgagggtagggacagacagtgcaggaggaacatagtccagtccaaggagaacatgcagacataggtaaacccagaaagaacagagaatcagaaggagccggaagattagaatacattggcagagttgggttgaggccaagcagagcaactgagaggctgagagcaaagccaggttgaataaatcagctgggagtggagtttcagccagaacagctgagtagacccagccatccagagttcaaaaaaaccaagaaaagttcagagggtgaaaactctctaggcctatat

SEQ ID NO: 12753 - protein, 149 aa, Rattus norvegicus
  ref <308>: DATABASE ACCESSION NUMBER: SWISS-Prot / AAB61953
  ref <309>: DATABASE ENTRY DATE: 2002-06-01
MPVQKQTVGGQLTRFKVFVAIGDYSGQVGLGIKCSKELASAIQGVTILVKLSIILARRSYGEQDWEDPHYPVHGDRLLWLCAGASHPCPQSTGISSAPVPTKPLMMAGIDDCYTSGRGCAAILDYFAKATFDAIFKTYSYLTRTRPLEH

SEQ ID NO: 12754 - DNA, 2401 bp, Rattus norvegicus
  ref <308>: DATABASE ACCESSION NUMBER: EMBL / M10068
  ref <309>: DATABASE ENTRY DATE: 2000-03-04
caacatgggggactctcacgaagacaccagtgccaccatgcctgaggccgtggctgaagaagtgtctctattcagcacgacggacatggttctgttttctctcatcgtgggggtcctgacctactggttcatctttagaaagaagaaagaagagataccggagttcagcaagatccaaacaacggccccacccgtcaaagagagcagcttcgtggaaaagatgaagaaaacgggaaggaacattatcgtattctatggctcccagacgggaaccgctgaggagtttgccaaccggctgtccaaggatgcccaccgctacgggatgcggggcatgtccgcagaccctgaagagtatgacttggccgacctgagcagcctgcctgagatcgacaagtccctggtagtcttctgcatggccacatacggagagggcgaccccacggacaatgcgcaggacttctatgactggctgcaggagactgacgtggacctcactggggtcaagtttgctgtatttggtcttgggaacaagacctatgagcacttcaatgccatgggcaagtatgtggaccagaggctggagcagcttggcgcccagcgcatctttgagttgggccttggtgatgatgacgggaacttggaagaggatttcatcacgtggagggagcagttctggccagctgtgtgcgagttctttggggtagaagccactggggaggagtcgagcattcgccagtatgagctcgtggtccacgaagacatggacgtagccaaggtgtacacgggtgagatgggccgtctgaagagctacgagaaccagaaaccccccttcgatgctaagaatccattcctggctgctgtcaccgccaaccggaagctgaaccaaggcactgagcggcatctaatgcacctggagttggacatctcagactccaagatcaggtatgaatctggagatcacgtggctgtgtacccagccaatgactcagccctggtcaaccagattggggagatcctgggagctgacctggatgtcatcatgtctctaaacaatctcgatgaggagtcaaacaagaagcatccgttcccctgccccaccacctaccgcacggccctcacctactacctggacatcactaacccgccacgcaccaatgtgctctacgaactggcacagtacgcctcagagccctcggagcaggagcacctgcacaagatggcgtcatcctcaggcgagggcaaggagctgtacctgagctgggtggtggaagcccggaggcacatcctagccatcctccaagactacccatcactgcggccacccatcgaccacctgtgtgagctgctgccacgcctgcaggcccgatactactccattgcctcatcctccaaggtccaccccaactccgtgcacatctgtgccgtggccgtggagtacgaagcgaagtctggccgagtgaacaagggggtggccactagctggcttcgggccaaggaaccagcaggcgagaatggcggccgcgccctggtacccatgttcgtgcgcaaatctcagttccgcttgcctttcaagtccaccacacctgtcatcatggtgggccccggcactgggattgcccctttcatgggcttcatccaggaacgagcttggcttcgagagcaaggcaaggaggtgggagagacgctgctatactatggctgccggcgctcggatgaggactatctgtaccgtgaagagctagcccgcttccacaaggacggtgccctcacgcagcttaatgtggccttttcccgggagcaggcccacaaggtctatgtccagcaccttctgaagagagacagggaacacctgtggaagctgatccacgagggcggtgcccacatctatgtgtgcggggatgctcgaaatatggccaaagatgtgcaaaacacattctatgacattgtggctgagttcgggcccatggagcacacccaggctgtggactatgttaagaagctgatgaccaagggccgctactcactagatgtgtggagctaggagctaccaccctcccacccctcgctccctgtaatcacctaacttctgccgacctccacctctggtggttcctgcctggcctggacacagggaggcccagggactgactcctcctggcctgagtggtgccctcctgggcccctaggcagagcccggtccattgtatcaggcagcccagccccagggcacatggcaagagggactggacccacctttgggtgatgggtgccttaggtcctctgcagctgtacagaaggggctcttctctccacagagctggggtgcagcccccacacgtgattttgaatgagtgtaaataattttaaataacctggcccttggaataaagttgttttcagt

SEQ ID NO: 12755 - protein, 677 aa, Rattus norvegicus; identical to SEQ ID NO: 11638
  ref <308>: DATABASE ACCESSION NUMBER: SWISS-Prot / AAA41064
  ref <309>: DATABASE ENTRY DATE: 2002-06-15

SEQ ID NO: 12756 - DNA, 2034 bp, Homo sapiens
  ref <308>: DATABASE ACCESSION NUMBER: EMBL / AB051763
  ref <309>: DATABASE ENTRY DATE: 2000-11-29
atgggagactcccacgtggacaccagctccaccgtgtccgaggcggtggccgaagaagtatctcttttcagcatgacggacatgattctgttttcgctcatcgtgggtctcctaacctactggttcctcttcagaaagaaaaaagaagaagtccccgagttcaccaaaattcagacattgacctcctctgtcagagagagcagctttgtggaaaagatgaagaaaacggggaggaacatcatcgtgttctacggctcccagacggggactgcagaggagtttgccaaccgcctgtccaaggacgcccaccgctacgggatgcgaggcatgtcagcggaccctgaggagtatgacctggccgacctgagcagcctgccagagatcgacaacgccctggtggttttctgcatggccacctacggtgagggagaccccaccgacaatgcccaggacttctacgactggctgcaggagacagacgtggatctctctggggtcaagttcgcggtgtttggtcttgggaacaagacctacgagcacttcaatgccatgggcaagtacgtggacaagcggctggagcagctcggcgcccagcgcatctttgagctggggttgggcgacgacgatgggaacttggaggaggacttcatcacctggcgagagcagttctggccggccgtgtgtgaacactttggggtggaagccactggcgaggagtccagcattcgccagtacgagcttgtggtccacaccgacatagatgcggccaaggtgtacatgggggagatgggccggctgaagagctacgagaaccagaagcccccctttgatgccaagaatccgttcctggctgcagtcaccaccaaccggaagctgaaccagggaaccgagcgccacctcatgcacctggaattggacatctcggactccaaaatcaggtatgaatctggggaccacgtggctgtgtacccagccaacgactctgctctcgtcaaccagctgggcaaaatcctgggtgccgacctggacgtcgtcatgtccctgaacaacctggatgaggagtccaacaagaagcacccattcccgtgccctacgtcctaccgcacggccctcacctactacctggacatcaccaacccgccgcgtaccaacgtgctgtacgagctggcgcagtacgcctcggagccctcggagcaggagctgctgcgcaagctggcctcctcctccggcgagggcaaggagctgtacctgagctgggtggtggaggcccggaggcacatcctggccatcctgcaggactgcccgtccctgcggccccccatcgaccacctgtgtgagctgctgccgcgcctgcaggcccgctactactccatcgcctcatcctccaaggtccaccccaactctgtgcacatctgtgcggtggttgtggagtacgagaccaaggccggccgcatcaacaagggcgtggccaccaactggctgcgggccaaggagcctgccggggagaacggcggccgtgcgctggtgcccatgttcgtgcgcaagtcccagttacgcctgcccttcaaggccaccacgcctgtcatcatggtgggccccggcaccggggtggcacccttcataggcttcatccaggagcgggcctggctgcgacagcagggcaaggaggtgggggagacgctgctgtactacggctgccgccgctcagatgaggactacctgtaccgggaggagctggcgcagttccacagggacggtgcgctcacccagctcaacgtggccttctcccgggagcagtcccacaaggtctacgtccagcacctgctaaagcaagaccgagagcacctgtggaagttgatcgaaggcggtgcccacatctacgtctgtggggatgcacggaacatggccagggatgtgcagaacaccttctacgacatcgtggctgagctcggggccatggagcacgcgcaggcggtggactacatcaagaaactgatgaccaagggccgctactccctggacgtgtggagctag

SEQ ID NO: 12757 - protein, 676 aa, Homo sapiens
  ref <308>: DATABASE ACCESSION NUMBER: SWISS-Prot / BAB18572
  ref <309>: DATABASE ENTRY DATE: 2002-06-15
GDSHVDTSSTVSEAVAEEVSLFSMTDMILFSLIVGLLTYWFLFRKKKEEVPEFTKIQTLTSSVRESSFVEKMKKTGRNIIVFYGSQTGTAEEFANRLSKDAHRYGMRGMSADPEEYDLADLSSLPEIDNALVVFCMATYGEGDPTDNAQDFYDWLQETDVDLSGVKFAVFGLGNKTYEHFNAMGKYVDKRLEQLGAQRIFELGLGDDDGNLEEDFITWREQFWPAVCEHFGVEATGEESSIRQYELVVHTDIDAAKVYMGEMGRLKSYENQKPPFDAKNPFLAAVTTNRKLNQGTERHLMHLELDISDSKIRYESGDHVAVYPANDSALVNQLGKILGADLDVVMSLNNLDEESNKKHPFPCPTSYRTALTYYLDITNPPRTNVLYELAQYASEPSEQELLRKMASSSGEGKELYLSWVVEARRHILAILQDCPSLRPPIDHLCELLPRLQARYYSIASSSKVHPNSVHICAVVVEYETKAGRINKGVATNWLRAKEPAGENGGRALVPMFVRKSQFRLPFKATTPVIMVGPGTGVAPFIGFIQERAWLRQQGKEVGETLLYYGCRRSDEDYLYREELAQFHRDGALTQLNVAFSREQSHKVYVQHLLKQDREHLWKLIEGGAHIYVCGDARNMARDVQNTFYDIVAELGAMEHAQAVDYIKKLMTKGRYSLDVWS

SEQ ID NO: 12758 - DNA, 628 bp, Rattus norvegicus; identical to SEQ ID NO: 3252
  ref <308>: DATABASE ACCESSION NUMBER: EMBL / M10094
  ref <309>: DATABASE ENTRY DATE: 2000-03-04

SEQ ID NO: 12759 - DNA, 2959 bp, Homo sapiens; identical to SEQ ID NO: 3254
  ref <308>: DATABASE ACCESSION NUMBER: EMBL / I38874
  ref <309>: DATABASE ENTRY DATE: 1997-05-16

SEQ ID NO: 12760 - DNA, 628 bp, Rattus norvegicus; identical to SEQ ID NO: 3252
  ref <308>: DATABASE ACCESSION NUMBER: EMBL / M10094
  ref <309>: DATABASE ENTRY DATE: 2000-03-04

SEQ ID NO: 12761 - DNA, 2959 bp, Homo sapiens; identical to SEQ ID NO: 3254
  ref <308>: DATABASE ACCESSION NUMBER: EMBL / I38874
  ref <309>: DATABASE ENTRY DATE: 1997-05-16

SEQ ID NO: 12762 - DNA, 1410 bp, Rattus norvegicus
  misc_feature (1)..(1410): n=a, c, g or t
  ref <308>: DATABASE ACCESSION NUMBER: EMBL / M10140
  ref <309>: DATABASE ENTRY DATE: 2000-03-04
tcaccaccacctccacagcaaagacagacactcaggagccagccagccagggtcccaaaggccgtcaccatgccgttcggcaacacccacaacaagttcaagctgaactacaagtcgcaggaggagtacccagacctcagcaaacacaacaaccacatggccaaggtgctgactcctgacctgtacaataagcttcgagacaaggagaccccatccggcttcactctggacgatgtcatccagactggggtggacaacccgggtcaccctttcatcatgacggtcggctgtgtggccggcgatgaggagtcctacactgttttcaaggacctgtttgaccccatcatccaggaccgccatggtggcttcaaacccacagacaagcataagaccgacctcaaccacgagaacctcaagggtggagacgatctggaccccaactatgtgctgagcagccgcgtgcgcactggccgcagcatcaagggctacactctgcccccgcactgctcccgcggagagcgccgtgctgtagagaagctgtccgtggaagctctcaacagcctgacaggcgagttcaagggcaaatactaccctctgaagagcatgacagagcaggagcagcagcagctcattgatgaccacttcctgtttgacaagcccgtgtcacctctgctgctggcctcaggcatggcccgagactggcccgacgcccgtggcatctggcacaacgacaacaaaagcttcctggtgtgggtgaatgaggaggaccaccttcgcgtgatctccatggagaaaggaggcaatatgaaggaagttttccgccgcttctgcgtgggcctgcagaagattgaggagatcttcaagaaggctggtcaccccttcatgtggaacgagcacctgggctacgtgctcacctgcccctccaacctgggcaccgggctgcgcggaggcgtgcacgtgaagctggcgaacctgagcaagcaccccaagtttgaggagattctcacccgccttcgtctgcagaagcgcggcacaggtggcgtggacaccgctgcggtgggcgccgtgttcgacatctccaacgccgatcggctgggctcttccgaggtcgaacaggtgcagctggtggtggatggcgtaaagcttatggtggagatggagaagaagctggaaaaaggccagtccatcgacgacatgatccctgcgcagaagtaggcgccgcacagagcgcaccagtcagcggcttgcagctggagccccgccccctggaagtccaaccaaccgactttgccctctgggttctggccaatgagaacctgcctctccggggccccgcccgcctgctggaactcctgcacttgggcgctgcttccccacgccctgccttaaataaaagtncgtggtggtctt

SEQ ID NO: 12763 - protein, 381 aa, Rattus norvegicus
  ref <308>: DATABASE ACCESSION NUMBER: SWISS-Prot / AAA40935
  ref <309>: DATABASE ENTRY DATE: 2000-05-30
MPFGNTHNKFKLNYKSQEEYPDLSKHNNHMAKVLTPDLYNKLRDKETPSGFTLDDVIQTGVDNPGHPFIMTVGCVAGDEESYTVFKDLFDPIIQDRHGGFKPTDKHKTDLNHENLKGGDDLDPNYVLSSRVRTGRSIKGYTLPPHCSRGERRAVEKLSVEALNSLTGEFKGKYYPLKSMTEQEQQQLIDDHFLFDKPVSPLLLASGMARDWPDARGIWHNDNKSFLVWVNEEDHLRVISMEKGGNMKEVFRRFCVGLQKIEEIFKKAGHPFMWNEHLGYVLTCPSNLGTGLRGGVHVKLANLSKHPKFEEILTRLRLQKRGTGGVDTAAVGAVFDISNADRLGSSEVEQVQLVVDGVKLMVEMEKKLEKGQSIDDMIPAQK

SEQ ID NO: 12764 - DNA, 1548 bp, Homo sapiens
tgtcacctccaggatacagacagccccccttcagcccagcccagccaggtctcctacaccgccaccatgccattcggtaacacccacaacaagttcaagctgaattacaagcctgaggaggagtaccccgacctcagcaaacataacaaccacatggccaaggtactgacccttgaactctacaagaagctgcgggacaaggagactccatctggcttcactgtagacgatgtcatccagacaggagtggacaacccaggtcaccccttcatcatgaccgtgggctgcgtggctggtgatgaggagtcctacgaagttttcaaggaactctttgaccccatcatctcggatcgccacgggggctacaaacccactgacaagcacaagactgacctcaaccatgaaaacctcaagggtggagacgacctggaccctaactacgtgctcagcagccgcgtccgcactggccgcagcatcaagggctacacgttgcccccacactgctcccgtggcgagcgccgggcggtggagaagctctctgtggaagctctcaacagcctgacgggcgagttcaaagggaagtactaccctctgaagagcatgacggagaaggagcagcagcagctcatcgatgaccacttcctgttcgacaagcccgtgtccccgctgctgctggcctcaggcatggcccgcgactggcccgacgcccgtggcatctggcacaatgacaacaagagcttcctggtgtgggtgaacgaggaggatcacctccgggtcatctccatggagaaggggggcaacatgaaggaggttttccgccgcttctgcgtagggctgcagaagattgaggagatctttaagaaagctggccaccccttcatgtggaaccagcacctgggctacgtgctcacctgcccatccaacctgggcactgggctgcgtggaggcgtgcatgtgaagctggcgcacctgagcaagcaccccaagttcgaggagatcctcacccgcctgcgtctgcagaagaggggtacaggtggcgtggacacagctgccgtgggctcagtatttgacgtgtccaacgctgatcggctgggctcgtccgaagtagaacaggtgcagctggtggtggatggtgtgaagctcatggtggaaatggagaagaagttggagaaaggccagtccattgacgacatgatccccgcccagaagtaggcgcctgcccacctgccaccgactgctggaacccagccagtgggagggcctggcccaccagagtcctgctccctcactcctcgccccgccccctgtcccagagtcccacctgggggctctctccacccttctcagagttccagtttcaaccagagttccaaccaatgggctccatcctctggattctggccaatgaaatatctccctggcagggtcctcttcttttcccagagctccaccccaaccaggagctctagttaatggagagctcccagcacactcggagcttgtgctttgtctccacgcaaagcgataaataaaagcattggtggcctt

SEQ ID NO: 12765 - protein, 381 aa, Homo sapiens
MPFGNTHNKFKLNYKPEEEYPDLSKHNNHMAKVLTLELYKKLRDKETPSGFTVDDVIQTGVDNPGHPFIMTVGCVAGDEESYEVFKELFDPIISDRHGGYKPTDKHKTDLNHENLKGGDDLDPNYVLSSRVRTGRSIKGYTLPPHCSRGERRAVEKLSVEALNSLTGEFKGKYYPLKSMTEKEQQQLIDDHFLFDKPVSPLLLASGMARDWPDARGIWHNDNKSFLVWVNEEDHLRVISMEKGGNMKEVFRRFCVGLQKIEEIFKKAGHPFMWNQHLGYVLTCPSNLGTGLRGGVHVKLAHLSKHPKFEEILTRLRLQKRGTGGVDTAAVGSVFDVSNADRLGSSEVEQVQLVVDGVKLMVEMEKKLEKGQSIDDMIPAQK

SEQ ID NO: 12766 - DNA, 1519 bp, Rattus norvegicus
  ref <308>: DATABASE ACCESSION NUMBER: EMBL / M11266
  ref <309>: DATABASE ENTRY DATE: 2000-03-04
tgcaactgaaagcattcttagcttgccagtggcccccactgcctgcctgcctgcggaactctctagaccatagattcctcctccactctagcaagagaagatgctgtctaatttgaggatcctgctcaacaaggcagctcttagaaaggctcacacttccatggttcgaaattttcggtatgggaagccagtccagagtcaagtacagctgaaaggccgtgacctcctcaccctgaagaacttcacaggagaggagattcagtacatgctatggctctctgcagatctgaaattcaggatcaaacagaaaggagaatacttgcctttattgcaagggaaatccttagggatgatttttgagaaaagaagtactcgaacaagactgtccacagaaacaggcttcgctcttctgggaggacatccttcttttcttaccacacaagacattcacttgggcgtgaatgaaagtctcacagacacagctcgtgtgttatctagcatgacagatgcagtgttagctcgagtgtataaacaatcagatctggacatcctggctaaggaagcaaccatcccaattgtcaacggactgtcagacctgtatcatcctatccagatcctggctgattaccttacactccaggaacactatggctctctcaaaggtctcaccctcagctggataggagatgggaacaatatcctgcactccatcatgatgagtgctgcaaaattcgggatgcaccttcaagcagctactccaaagggttatgagccagatcctaatatagtcaagctagcagagcagtatgccaaggagaatggtaccaggttgtcaatgacaaatgatccactggaagcagcacgtggaggcaatgtattaattacagatacttggataagcatgggacaagaggatgagaagaaaaagcgtcttcaagctttccaaggttaccaggttacaatgaagactgctaaagtggctgcgtctgactggacgtttttacactgcttgcctagaaagccagaagaagtagatgatgaagtgttttattctccgcggtcattagtgttcccagaggcagaaaatagaaagtggacaatcatggctgtcatggtatccctgctgacagactactcacctgtgctccagaagccaaagttctgatgcctgcaagaggacgaaaaacccaaaagacaaaaaaatctgttctttagcagcagaataagtcagtttatgtagaaaagagaagaattgaaattgtaaacacatccctagtgcgtgatataattatgtaattgctttgctattgtgagaattgcttaaagcttttagtttaagtgctgggcattttattatcctgcttgacttgacttaagcactctcttcaattcacaacttctgaatgatatttgggtttcatattaattatcatacacatttccttccactaagcattaaacactatgcttacaatgcataccatctaagtcattaaatgtaatccatgcttattacctt

SEQ ID NO: 12767 - protein, 354 aa, Rattus norvegicus
  ref <308>: DATABASE ACCESSION NUMBER: SWISS-Prot / AAA41767
  ref <309>: DATABASE ENTRY DATE: 2001-10-16
MLSNLRILLNKAALRKAHTSMVRNFRYGKPVQSQVQLKGRDLLTLKNFTGEEIQYMLWLSADLKFRIKQKGEYLPLLQGKSLGMIFEKRSTRTRLSTETGFALLGGHPSFLTTQDIHLGVNESLTDTARVLSSMTDAVLARVYKQSDLDILAKEATIPIVNGLSDLYHPIQILADYLTLQEHYGSLKGLTLSWIGDGNNILHSIMMSAAKFGMHLQAATPKGYEPDPNIVKLAEQYAKENGTRLSMTNDPLEAARGGNVLITDTWISMGQEDEKKKRLQAFQGYQVTMKTAKVAASDWTFLHCLPRKPEEVDDEVFYSPRSLVFPEAENRKWTIMAVMVSLLTDYSPVLQKPKF

SEQ ID NO: 12768 - DNA, 1917 bp, Homo sapiens
  ref <308>: DATABASE ACCESSION NUMBER: Refseq / NM_000531
  ref <309>: DATABASE ENTRY DATE: 2000-10-31
gagccccaggactgagatatttttactataccttctctatcatcttgcacccccaaaatagcttccagggcacttctatttgtttttgtggaaagactggcaattagaggtagaaaagtgaaataaatggaaatagtactactcagggctgtcacatctacatctgtgtttttgcagtgccaatttgcattttctgagtgagttacttctactcaccttcacagcagccagtaccgcagtgccttgcatatattatatcctcaatgagtacttgtcaattgattttgtacatgcgtgtgacagtataaatatattatgaaaaatgaggaggccaggcaataaaagagtcaggatttcttccaaaaaaaatacacagcggtggagcttggcataaagttcaaatgctcctacaccctgccctgcagtatctctaaccaggggactttgataaggaagctgaagggtgatattacctttgctccctcactgcaactgaacacatttcttagtttttaggtggcccccgctggctaacttgctgtggagttttcaagggcatagaatcgtcctttacacaattaaaagaagatgctgtttaatctgaggatcctgttaaacaatgcagcttttagaaatggtcacaacttcatggttcgaaattttcggtgtggacaaccactacaaaataaagtgcagctgaagggccgtgaccttctcactctaaaaaactttaccggagaagaaattaaatatatgctatggctatcagcagatctgaaatttaggataaaacagaaaggagagtatttgcctttattgcaggggaagtccttaggcatgatttttgagaaaagaagtactcgaacaagattgtctacagaaacaggctttgcacttctgggaggacatccttgttttcctaccacacaagatattcatttgggtgtgaatgaaagtctcacggacacggcccgtgtattgtctagcatggcagatgcagtattggctcgagtgtataaacaatcagatttggacacccttgctaaagaagcatccatcccaattatcaatgggctgtcagatttgtaccatcctatccagatcctggctgattacctcacgctccaggaacactatagctctctgaaaggtcttaccctcagctgtttcggggatgggaacaatatcctgcactccatcatgatgagcgcagcgaaattcggaatgcaccttcaggcagctactccaaagggttatgagccggatgctagtgtaaccaagttggcagagcagtatgccaaagagaatggtaccaagctgttgctgacaaatgatccattggaagcagcgcatggaggcaatgtattaattacagacacttggataagcatgggacgagaagaggagaagaaaaagcggctccaagctttccaaggttaccaagttacaatgaagactgctaaagttgctgcctctgactggacatttttacactgcttgcccagaaagccagaagaagtggatgatgaagtcttttattctcctcgatcactagtgttcccagaggcagaaaacagaaagtggacaatcatggctgtcatggtgtccctgctgacagattactcacctcagctccagaagcctaaattttgatgttgtgttacttgtcaagaaagaagcaatgttggtcagtaacagaatgagttggtttatggggaaaagagaagagaatctaaaaaataaaccaatccctaacacgtggtatgggcgaatcgtacgatatgctttgccattgtgaaactttccttaagccttcaatttaagtgctgatgcactgtaatacgtgcttaactttgcttaaactctctaattcccaatttctgagttacatttagatatcatattaactatcatata

SEQ ID NO: 12769 - protein, 354 aa, Homo sapiens
  ref <308>: DATABASE ACCESSION NUMBER: Refseq / NP_000522
  ref <309>: DATABASE ENTRY DATE: 2000-10-31
MLFNLRILLNNAAFRNGHNFMVRNFRCGQPLQNKVQLKGRDLLTLKNFTGEEIKYMLWLSADLKFRIKQKGEYLPLLQGKSLGMIFEKRSTRTRLSTETGFALLGGHPCFPTTQDIHLGVNESLTDTARVLSSMADAVLARVYKQSDLDTLAKEASIPIINGLSDLYHPIQILADYLTLQEHYSSLKGLTLSCFGDGNNILHSIMMSAAKFGMHLQAATPKGYEPDASVTKLAEQYAKENGTKLLLTNDPLEAAHGGNVLITDTWISMGREEEKKKRLQAFQGYQVTMKTAKVAASDWTFLHCLPRKPEEVDDEVFYSPRSLVFPEAENRKWTIMAVMVSLLTDYSPQLQKPKF

SEQ ID NO: 12770 - DNA, 610 bp, Rattus norvegicus
  ref <308>: DATABASE ACCESSION NUMBER: EMBL / M11851
  ref <309>: DATABASE ENTRY DATE: 2000-03-04
ctccttgaattcttcagaggcagcagccagcctcagacaccatgtcaccaaagaaagccaagaagaggttagagggcggaagctccaacgtgttctccatgtttgagcagacccagatccaggagttcaaggaggccttcacaatcatggaccagaacagagccggcttcattgacaagaatgacctaagggacacgtttgctgccctcggacgagtgaacgtgaaaaacgaagagatcgatgagatgatcaaagaggctccaggtccaattaacttcactgtgttcctcaccatgtttagggagaaacttaaaggagctggcccggaggagacccttctcaacgccttcaaggtgtttgccccaaggcgaaggattactggagccgactgtgtccaagagatgctaaccacgcaagcagagaggttctccaaagaagagaccgaccagatgttcgcagcttttccccctaacgtcaccggcaaccttgattataagaatttggttcacatcatcacccacggagaagagaaggactgagccctgaaccgcggcctcgggtgacctatagcctgttctccatccccaggccctgctgtcccacctgcggg

SEQ ID NO: 12771 - protein, 165 aa, Rattus norvegicus
  ref <308>: DATABASE ACCESSION NUMBER: SWISS-Prot / AAA41621
  ref <309>: DATABASE ENTRY DATE: 2001-10-16
SPKKAKKRLEGGSSNVFSMFEQTQIQEFKEAFTIMDQNRDGFIDKNDLRDTFAALGRVNVKNEEIDEMIKEAPGPINFTVFLTMFGEKLKGADPEETILNAFKVFDPEGKGSLKADYVREMLTTQAERFSKEEIDQMFAAFPPDVTGNLDYKNLVHIITHGEEKD

SEQ ID NO: 12772 - DNA, 605 bp, Homo sapiens
  ref <308>: DATABASE ACCESSION NUMBER: EMBL / AF020768
  ref <309>: DATABASE ENTRY DATE: 1997-12-22
ccaccatggcacctaagaaagcaaagaagagggccgggggcgccaactccaacgtgttctccatgttcgaacagacccaaatccaggaatttaaggaggccttcactatcatggaccagaacagggatggcttcattgacaagaacgatctgagagacacctttgctgcccttgggcgagtgaacgtgaaaaatgaagaaattgatgaaatgatcaaggaggctccgggtccaattaactttactgtgttcctcacaatgtttggggagaaacttaagggagcggaccctgaggaaaccattctcaacgcattcaaagtgtttgaccctgaaggcaaaggggtgctgaaggctgattacgttcgggaaatgctgaccacgcaggcggagaggttttccaaggaggaggttgaccagatgttcgccgccttcccccctgacgtgactggcaacttggactacaagaacctggtgcacatcatcacccacggagaagagaaggactaggagggggctcgctcgtgcgccctgggctcgtctttgcagagtggtccctgccctcatctctctcccccgagtaccgcctctgtccctaccttgtctgtt

SEQ ID NO: 12773 - protein, 165 aa, Homo sapiens
  ref <308>: DATABASE ACCESSION NUMBER: SWISS-Prot / AAB91993
  ref <309>: DATABASE ENTRY DATE: 2001-10-16
APKKAKKRAGGANSNVFSMFEQTQIQEFKEAFTIMDQNRDGFIDKNDLRDTFAALGRVNVKNEEIDEMIKEAPGPINFTVFLTMFGEKLKGADPEETILNAFKVFDPEGKGVLKADYVREMLTTQAERFSKEEVDQMFAAFPPDVTGNLDYKNLVHIITHGEEKD

SEQ ID NO: 12774 - DNA, 456 bp, Rattus norvegicus
  ref <308>: DATABASE ACCESSION NUMBER: EMBL / M12579
  ref <309>: DATABASE ENTRY DATE: 2000-03-04
tggtatccctttggctttcacatccaaacagaatggaaacgatccccaaactgatggccgctgttgttctgttgactgtgtgtttggaaggctgctccagccagcactggtcctatgggttgcgccctggggggaagagaaatactgaacacttggttgattctttccaagagatgggcaaggaggaggatcaaatggcagaaccccagaacttcgaatgcactgtccactggccccgttcacctcttagggatctgcgaggagctctggaacgtctgattgaagaggaagctgggcagaagaagatgtaatgcactggcccagaaggatccacaacatccgagtgtgacattgacgctgagatccatgacctgttacagctctgtaattgtgtgggcttccgcatttctatacccagcagcgtagatttcataataaagtaatgtgttgtggatc

SEQ ID NO: 12775 - protein, 92 aa, Rattus norvegicus
  ref <308>: DATABASE ACCESSION NUMBER: SWISS-Prot / AAA41263
  ref <309>: DATABASE ENTRY DATE: 2001-10-16
METIPKLMAAVVLLTVCLEGCSSQHWSYGLRPGGKRNTEHLVDSFQEMGKEEDQMAEPQNFECTVHWPRSPLRDLRGALERLIEEEAGQKKM

SEQ ID NO: 12776 - DNA, 1512 bp, Homo sapiens
  ref <308>: DATABASE ACCESSION NUMBER: EMBL / X01059
  ref <309>: DATABASE ENTRY DATE: 1995-03-21
agggctttatgtgaggatttttaaaaattaccattaaaaaaaaaaaagcatagtccatttgcagtataatttaccagcaggaaagatttcaatgtcctggaaaaattccctataaaaaggaagataggaaaacagaaaagtcacagtactcaacctacttcaagggaagattgagatctttttggctctctgcctctaaacaggtaaaaggctttgtattatttctagcacgagtttttcttctttagattgcatgctattgtatgtctacagggcatttgacagcccaagggctaaatccaggtgtgacggtatctaatgatgtcctgtccttcactgtccttgccatcaccagccacagagatccaggctttggggactcccacagcttatcgaccagtgtttgatttagtttttagcctctttcccatcaaatgaaaattaacttggagacacatttcattagaaaattagaggcccccttggctaggaaggcatctggtctgggactaactactttgaacagtgttgagtcctctctcccacagatggttcagccagcagtaatgctaggcaagactgaaggataaatagaaaaatgtcattagtaccatggggtagccatgtaatgtcaagcaattttatattagccagagattcctagtaggagctacttttcttaacagatgactcagttctctctatctcaggaatgaaagagttgaagaccaatccacaacaggggaaatgttaaggcaaaatgatgaacttgataagggatgaattatggggtttggataaccaaacaataaaaataaaagtatagactattttagtactaaaaaggtcctgaacatgtgagcttaagtactcattttgtccccagtggctaagaaactaaaggcaagccagcaagtgtctctgagtttcagtgtctgtatgtaaaaactgactctgacttccatcttctgcagggttagtgatacagatgctagctttttcactaaagaggtcttttagtttatactcaaccttgtctggatctaatttgattgtgcattcatgtgccttagaatgaagccaattcaaaaactcctagctggccttattctactgacttcgtgcgtggaaggctgctccagccagcactggtcctatggactgcgccctggaggaaagagagatgccgaaaatttgattgattctttccaagagatagtcaaagaggttggtcaactggcagaaacccaacgcttcgaatgcaccacgcaccagccacgttctcccctccgagacctgaaaggagctctggaaagtctgattgaagaggaaactgggcagaagaagatttaaatccattgggccagaaggaatgaccattactaacatgacttaagtataattctgacattgaaaatttataacccattaaatacctgtaaatggtatgaatttcagaaatccttacaccaagttgcacatattccataataaagtgctgtgttgtgaatg

SEQ ID NO: 12777 - protein, 92 aa, Homo sapiens
  ref <308>: DATABASE ACCESSION NUMBER: SWISS-Prot / CAA25526
  ref <309>: DATABASE ENTRY DATE: 2002-06-15
MKPIQKLLAGLILLTWCVEGCSSQHWSYGLRPGGKRDAENLIDSFQEIVKEVGQLAETQRFECTTHQPRSPLRDLKGALESLIEEETGQKKI

SEQ ID NO: 12778 - DNA, 2524 bp, Rattus norvegicus
  ref <308>: DATABASE ACCESSION NUMBER: EMBL / M15427
  ref <309>: DATABASE ENTRY DATE: 2000-03-04
gcccggctccctcaggtataagtatgttgaaattgcatcaatggagcacatacagggagcttggaagacgatcagcaatggtttcggactcaaagatgctgtgtttgatggctccagttgcatctcccctacaattgttcagcagtttggctatcagcgtcgggcctctgatgatggcaaactcacggattcttctaagacaagcaatactatccgggttttcttgccgaataagcaaaggactgtggtcaatgtgcggaatgggatgagcttgcacgactgccttatgaaagctctgaaggttagaggcctgcagccagagtgctgtgcagtgttcagacttcttcaggagcacaaaggtaagaaagcacgcttagattggaacaccgacgccgcctctctgattggagaagaactgcaagtggattttttggatcacgttccactcacaactcacaactttgctcggaaaacgttcctgaagcttgcattctgtgacatctgtcaaaagttcctgctaaatggatttcgatgtcagacttgtggctacaagtttcatgagcactgtagcaccaaagtacctactatgtgtgtggactggagtaatatcagacagctcttgctgtttccaaattccactgcaagtgacagtggagtcccagcaccaccctctttcacaatgcgtcggatgcgagaatctgtttcccggatgcctgctagttcccagcacagatactccacaccccatgccttcactttcaacacctccagcccttcctctgaaggttccctgtcccagaggcagaggtcaacgtccactcccaatgtccacatggtcagcaccaccctgcctgtggacagcaggatgattgaggatgcaattcgaagtcacagtgaatcagcctcaccttcagccctgtccagcagccccaacaacctgagcccaacaggctggtcacagcccaaaacccctgtgccagcacaaagagagagggcgccaggatctgggacccaggaaaaaaacaaaattaggcctcgtgggcagagagattcaagttattactgggaaatagaagccagtgaggtgatgctgtctactcggattggctcgggctcctttggcactgtgtacaagggcaagtggcatggagatgttgcagtaaagatcctaaaggtggttgacccaactccagagcaacttcaggccttcaggaacgaggtggctgttttgcgcaaaacacggcatgttaatatcctgctgttcatggggtacatgacaaaggacaacctggcgattgtgacccagtggtgtgaaggcagcagtctctacaaacacctgcatgtccaggagaccaaattccagatgttccagctaattgacattgcccggcagacagctcagggaatggactatttacatgcaaagaacatcatccacagagacatgaaatccaacaatatatttctccatgaaggcctcacggtgaaaatcggagattttggtttggcaacagtgaagtcgcgctggagtggttctcagcaggttgaacagcccactggctctgtgctgtggatggccccagaagtaatccgaatgcaggataacaacccgttcagcttccagtccgatgtctactcctatggcattgtgctgtatgagctgatgactggggagcttccctactcccacatcaacaaccgagaccagatcatcttcatggtgggccgtgggtacgcctccccagatcttagcaggctctacaagaactgccccaaggcaatgaagaggttggtggctgactgtgtgaagaaagtcaaagaagaaaggcctttgtttcctcagatcctgtcttccattgagctgcttcagcactctctgccgaaaatcaacaggagcgcctctgagccttccctgcatcgggcagctcacactgaggacatcaatgcttgtacgctgaccacatccccaaggctaccagtcttctagctgacgttatagctgttcttaggccaccaggggacgaagaagagtcagcaggcaccactttctgtttccttgggggcagaatgcatgtttccggaaaagctgctgctaaggacctagactactcacagggccttaacttcatattgccttcttttctacccttcctgccctggaaatggaagctgtccgccaagccagcctgctccagaggtatacaagtcagcgagtatttttagggcaaatggccttggagagagaaggcagggcactccggctactgcagggacatgcagttgggaacttggctcattgagctgtacagacagtggtgcagtgccagttttgcacatggagtcctggccacctgggggagcctgctttggtactacagaacttcactttgtggacacaccttcctcttactgagtctaagatgtcctgtgcagaggatgctttccaagcacggtgctccaccttctggcagcctcccacacgctgaatctgtcttccaggagctgccctatggggtgctgcagc

SEQ ID NO: 12779 - protein, 648 aa, Rattus norvegicus; identical to SEQ ID NO: 7485
  ref <308>: DATABASE ACCESSION NUMBER: SWISS-Prot / AAA42001
  ref <309>: DATABASE ENTRY DATE: 2002-06-15

SEQ ID NO: 12780 - DNA, 2977 bp, Homo sapiens
  ref <308>: DATABASE ACCESSION NUMBER: Refseq / NM_002880
  ref <309>: DATABASE ENTRY DATE: 2001-09-28
ccgaatgtgaccgcctcccgctccctcacccgccgcggggaggaggagcgggcgagaagctgccgccgaacgacaggacgttggggcggcctggctccctcaggtttaagaattgtttaagctgcatcaatggagcacatacagggagcttggaagacgatcagcaatggttttggattcaaagatgccgtgtttgatggctccagctgcatctctcctacaatagttcagcagtttggctatcagcgccgggcatcagatgatggcaaactcacagatccttctaagacaagcaacactatccgtgttttcttgccgaacaagcaaagaacagtggtcaatgtgcgaaatggaatgagcttgcatgactgccttatgaaagcactcaaggtgaggggcctgcaaccagagtgctgtgcagtgttcagacttctccacgaacacaaaggtaaaaaagcacgcttagattggaatactgatgctgcgtctttgattggagaagaacttcaagtagatttcctggatcatgttcccctcacaacacacaactttgctcggaagacgttcctgaagcttgccttctgtgacatctgtcagaaattcctgctcaatggatttcgatgtcagacttgtggctacaaatttcatgagcactgtagcaccaaagtacctactatgtgtgtggactggagtaacatcagacaactcttattgtttccaaattccactattggtgatagtggagtcccagcactaccttctttgactatgcgtcgtatgcgagagtctgtttccaggatgcctgttagttctcagcacagatattctacacctcacgccttcacctttaacacctccagtccctcatctgaaggttccctctcccagaggcagaggtcgacatccacacctaatgtccacatggtcagcaccacgctgcctgtggacagcaggatgattgaggatgcaattcgaagtcacagcgaatcagcctcaccttcagccctgtccagtagccccaacaatctgagcccaacaggctggtcacagccgaaaacccccgtgccagcacaaagagagcgggcaccagtatctgggacccaggagaaaaacaaaattaggcctcgtggacagagagattcaagctattattgggaaatagaagccagtgaagtgatgctgtccactcggattgggtcaggctcttttggaactgtttataagggtaaatggcacggagatgttgcagtaaagatcctaaaggttgtcgacccaaccccagagcaattccaggccttcaggaatgaggtggctgttctgcgcaaaacacggcatgtgaacattctgcttttcatggggtacatgacaaaggacaacctggcaattgtgacccagtggtgcgagggcagcagcctctacaaacacctgcatgtccaggagaccaagtttcagatgttccagctaattgacattgcccggcagacggctcagggaatggactatttgcatgcaaagaacatcatccatagagacatgaaatccaacaatatatttctccatgaaggcttaacagtgaaaattggagattttggtttggcaacagtaaagtcacgctggagtggttctcagcaggttgaacaacctactggctctgtcctctggatggccccagaggtgatccgaatgcaggataacaacccattcagtttccagtcggatgtctactcctatggcatcgtattgtatgaactgatgacgggggagcttccttattctcacatcaacaaccgagatcagatcatcttcatggtgggccgaggatatgcctccccagatcttagtaagctatataagaactgccccaaagcaatgaagaggctggtagctgactgtgtgaagaaagtaaaggaagagaggcctctttttccccagatcctgtcttccattgagctgctccaacactctctaccgaagatcaaccggagcgcttccgagccatccttgcatcgggcagcccacactgaggatatcaatgcttgcacgctgaccacgtccccgaggctgcctgtcttctagttgactttgcacctgtcttcaggctgccaggggaggaggagaagccagcaggcaccacttttctgctccctttctccagaggcagaacacatgttttcagagaagctctgctaaggaccttctagactgctcacagggccttaacttcatgttgccttcttttctatccctttgggccctgggagaaggaagccatttgcagtgctggtgtgtcctgctccctccccacattccccatgctcaaggcccagccttctgtagatgcgcaagtggatgttgatggtagtacaaaaagcaggggcccagccccagctgttggctacatgagtatttagaggaagtaaggtagcaggcagtccagccctgatgtggagacacatgggattttggaaatcagcttctggaggaatgcatgtcacaggcgggactttcttcagagagtggtgcagcgccagacattttgcacataaggcaccaaacagcccaggactgccgagactctggccgcccgaaggagcctgctttggtactatggaacttttcttaggggacacgtcctcctttcacagcttctaaggtgtccagtgcattgggatggttttccaggcaaggcactcggccaatccgcatctcagccctctcaggagcagtcttccatcatgctgaattttgtcttccaggagctgcccctatggggcgggccgcagggccagcctgtttctctaacaaacaaacaaacaaacagccttgtttctctagtcacatcatgtgtatacaaggaagccaggaatacaggttttcttgatgatttgggttttaattttgtttttattgcacctgacaaaatacagttatctgatggtccctcaattatgttattttaataaaataaattaaattt

SEQ ID NO: 12781 - protein, 648 aa, Homo sapiens [sequence omitted]

SEQ ID NO: 12782 - DNA, 1346 bp, Rattus norvegicus; identical to SEQ ID NO: 3326
  ref <308>: DATABASE ACCESSION NUMBER: EMBL / M15481
  ref <309>: DATABASE ENTRY DATE: 2000-03-04

SEQ ID NO: 12783 - protein, 153 aa, Rattus norvegicus
  ref <308>: DATABASE ACCESSION NUMBER: SWISS-Prot / AAA41387
  ref <309>: DATABASE ENTRY DATE: 2000-05-30
MGKISSLPTQLFKICLCDFLKIKIHIMSSSHLFYLALCLLTFTSSATAGPETLCGAELVDALQFVCGPRGFYFNKPTGYGSSIRRAPQTGIVDECCFRSCDLRRLEMYCAPLKPTKSARSIRAQRHTDMPKTQKEVHLKNTSRGSAGNKTYRM

SEQ ID NO: 12784 - DNA, 1161 bp, Rattus norvegicus
  ref <308>: DATABASE ACCESSION NUMBER: EMBL / M18528
  ref <309>: DATABASE ENTRY DATE: 1999-09-02
ggccacaccaaaggaagccatagagaggctgatatcagagtattcttggaagaggcaggagaaaatgaaagccaatctctgcttctaccttacatgtttgtgttaagggtgtcagataaactggtctggtatctctgtctgatgcatggaactattgtagctgaagaagaacatagtttcagggaagaaaggcaatagaaggaaggctctgaatagcttcaaagggtcagacccaatttactttctaaagtagctagggactagggaataactcaaaacccacaagactgtatacatgtgtcctggcttcattgttcctaatctgtagggataagtgtgcttttctgtgtgtctgtctataacatgcataatgcactgaaagggagattttccttgttacttcacaccatctctgcgcttccttcctcaggggctgatgctgcaccaactgtatccatcttcccaccatcctcggatcagttagcaactggaggtgcctcagtcgtgtgcatcatgaacaacttctatcccagagacatcagtgtcaagtggaagattgatggcagtgaacgacgagatggtgtcctggacagtgttactgatcaggacagcaaagacagcacgtacagcatgagcagcaccctcacgttgaccaaggctgactatgaaagtcataacctctatacctgtgaggttgttcataagacatcagcctcccccgtcgttaagagcttcaacaggaatgagtgttagacccaaaggacctgaggtgccacctgctccccagatccttccaatcttccctcctaaggtcttggagacttccccacaagcgacctaccactgttgcggtgctccaaacctcctccccacctcatcctccttcctttccttggctttgatcatgctaatatttggggaatattaaataaagtgaatctttgcacttgagatctttgtctttcttactaaatagtggttaacaattatttatcttgttacctggtttctcttctaaagaagttaaatgtttagttgccctgaaatccaccacacttaaacaacaaataaaactctcccccttgccctacttggttgtccactacatggcagtcctctctaaggttcacaagtactattcatggcttatttctctgggcc

SEQ ID NO: 12785 - DNA, 998 bp, Homo sapiens; identical to SEQ ID NO: 3410
  ref <308>: DATABASE ACCESSION NUMBER: EMBL / S65921
  ref <309>: DATABASE ENTRY DATE: 2000-03-04

SEQ ID NO: 12786 - protein, 237 aa, Homo sapiens; identical to SEQ ID NO: 3411
  misc_feature (1)..(237): Xaa=Unknown amino acid

SEQ ID NO: 12787 - DNA, 1110 bp, Rattus norvegicus
  ref <308>: DATABASE ACCESSION NUMBER: EMBL / M18853
  ref <309>: DATABASE ENTRY DATE: 2000-03-04
gtgtttcactagtgctcctgtggctccaattaaactgggtgagcagccaggagaaggtgcagcagagcccagaatccctcattgtcccagagggatccatagcttctctcaactgcacttccagtgatcgtaattttcagtacttctggtggtacagacagcattctggggaaggccccaaagccctgatgtccatcttatctaatggtgaaaagaaagaaggcagattcacagctcacttcagcaaagccagcctgcatgtttccctgcacattagagactctgaacccagtgactctgctctctacttctgtgcagcgagtgatgacaacagcaatgcaggcaaattaacctttggggatgggaccaggctcacagtgaagccaaatgtcacagacccagagcctgctgtgtaccagctgaaagatccccagtctgataacatcaccctctgcctgttcaccgactttgattctcaaaccaatgtgtcccagagcgcaagttccgaagcgtttgtctctggcaatactgtgatggacatgaaggctatggattccaagagcaacggggccattgcctggagtaaccaaacaagcttcagctgcaaagacgccttcaagaagaacgcctcccaccccacttcagatgtgccctgtgatgccaagttggtcgagaaaagctttgaaacagatatgaacctaaactttcaaaacctgtcagtcatgggactccgaatcctcctgctgaaagtggccggatttaacctgctcatgacgctaaggctgtggtccagttgagattgaaagagcgtgactccaaagctccttcctcctcctcatcctccgctccctcttcaagccaaaaggagccctcccacctcgtaaagaagggctgtctggactgactgggatctccccgatctgtgaagaaaggttgctggagagctaagctcagctgctacccactcagcccccttgctgctgctgaccattcacagagacgcaggggctgggcttctcctggatctgaagaacctcctctcccatgatagatttcccagcagaaatctcttagagaatgttgtaagatatgttttttgtgtggtttttt

SEQ ID NO: 12788 - DNA, 1080 bp, Homo sapiens
  ref <308>: DATABASE ACCESSION NUMBER: EMBL / M15565
  ref <309>: DATABASE ENTRY DATE: 2000-03-04
tccaaaatgaagggtctgtggaaggacatgaataaagcacaggaggttgaagtcagatttgcagctttctaggcaggagacaagacaatctgcatcttcacaggagggatggccatgctcctgggggcatcagtgctgattctgtggcttcagccagactgggtaaacagtcaacagaagaatgatgaccagcaagttaagcaaaattcaccatccctgagcgtccaggaaggaagaatttctattctgaactgtgactatactaacagcatgtttgattatttcctatggtacaaaaaataccctgctgaaggtcctacattcctgatatctataagttccattaaggataaaaatgaagatggaagattcactgtcttcttaaacaaaagtgccaagcacctctctctgcacattgtgccctcccagcctggagactctgcagtgtacttctgtgcagcaaagggggccggcactgccagtaaactcacctttgggactggaacaagacttcaggtcacgctcgatatccagaaccctgaccctgccgtgtaccagctgagagactctaaatccagtgacaagtctgtctgcctattcaccgattttgattctcaaacaaatgtgtcacaaagtaaggattctgatgtgtatatcacagacaaaactgtgctagacatgaggtctatggacttcaagagcaacagtgctgtggcctggagcaacaaatctgactttgcatgtgcaaacgccttcaacaacagcattattccagaagacaccttcttccccagcccagaaagttcctgtgatgtcaagctggtcgagaaaagctttgaaacagatacgaacctaaactttcaaaacctgtcagtgattgggttccgaatcctcctcctgaaagtggccgggtttaatctgctcatgacgctgcggctgtggtccagctgagatctgcaagattgtaagacagcctgtgctccctcgctccttcctctgcattgcccctcttctccctctccaaacagagggaactctcccacccccaaggaggtgaaagctgctaccaccctctgtgcc

SEQ ID NO: 12789 - protein, 139 aa, Homo sapiens
  ref <308>: DATABASE ACCESSION NUMBER: SWISS-Prot / AAA60627
  ref <309>: DATABASE ENTRY DATE: 1999-07-15
MAMLLGASVLILWLQPDWVNSQQKNDDQQVKQNSPSLSVQEGRISILNCDYTNSMFDYFLWYKKYPAEGPTFLISISSIKDKNEDGRFTVFLNKSAKHLSLHIVPSQPGDSAVYFCAAKGAGTASKLTFGTGTRLQVTL

SEQ ID NO: 12790 - DNA, 1110 bp, Rattus norvegicus; identical to SEQ ID NO: 12787
  ref <308>: DATABASE ACCESSION NUMBER: EMBL / M18853
  ref <309>: DATABASE ENTRY DATE: 2000-03-04

SEQ ID NO: 12791 - DNA, 1080 bp, Homo sapiens; identical to SEQ ID NO: 12788
  ref <308>: DATABASE ACCESSION NUMBER: EMBL / M15565
  ref <309>: DATABASE ENTRY DATE: 2000-03-04

SEQ ID NO: 12792 - protein, 139 aa, Homo sapiens; identical to SEQ ID NO: 12789
  ref <308>: DATABASE ACCESSION NUMBER: SWISS-Prot / AAA60627
  ref <309>: DATABASE ENTRY DATE: 1999-07-15

SEQ ID NO: 12793 - DNA, 6369 bp, Rattus norvegicus
  misc_feature (1)..(6369): n=a, c, g or t
  ref <308>: DATABASE ACCESSION NUMBER: EMBL / M19357
  ref <309>: DATABASE ENTRY DATE: 2000-03-04
agctgccttagngttatgtgtgtcctgagtcgccaggcaggtcacttggagcagaaaagttagtctcacctctggtcttgggcctgaagtcgctcctcggggctgctttcagctctcagtgagggaagcaaccagaangccctgcccctactgctcctaggtccctgtgcacacggggctcagatggcactaggcattttcctttagagttaggaatgtgtacagagagtagtctcctctctttctctttatttttgtctattgttttaaagttggaaaggcttttagtttagcatatatttagcatataactgatgaggaaatttctgtatgtgtgtttcacagtctgcatgacacggctgccatgtcaaacttattttgaatggaattgccttacactgttttctgtcatagataaaaatgctataaatgaaatgaaagagaaccattgtcatactaaatacaaaatcaaattatagatctgaggcctatattttttaaaaggttgctatattttagaagttaaaagttatgagtagagttggttttttatttttgtttactgtgtattttacttagtctaacacacaaaatattctttatacattaaatttatattataggaaaatatattaagggatatttgtgctcttcatactgagtctttagatctnnnnnnnnnnnnnnnnnnnnnnnnnnnnnnnnnnnnnnnnnnnnnnnnnnnnnnnnnnnnnnnnnnnnnnnnnnnnnnnnnnnnnnnnnnnnnnnnnnnnnnnnnnnnnnnnnnnnnnnnnnnnnnnnnnnnnnnnnnnnnnnnnnnnnnnnnnnnnnnnnnnnnnnnnnnnnnnnnnnnnnnnnnnnnnnnnnnnnnnnnnnnnnnnnnnnnnnnnnnnnnnnnatattatcttcttttagtcctacaggaaaggaaggttctttccccatcttttctaattgttaagggctgcggctgtagcttagccaggagcaacagcttaacttgtaagaggccctgacactcaacctccaatacactatttgctttcagctcttggaagaatttatttcaaaaggattctgcttagcacaaagctctgtagttagaaagttggcaggggagtggaagttgtagcagcaccataaccacgtgcactctaaaataagcaaaccagtaagcccttaattcatagtcaaacaatggctacagagaactatttagaaatcgttaacaaaggtgttcgaactgaagtcagcatccagaacagaccatgcatctgcagacattccctgggcttatctctttgccagcagtctaggctgcgtctggggctctttctccatcacttactgctcagaccctttctgcccatgtctccctcgttcttactgtccttgttacactgtaatgacatacttttttgagacgttttcagccataggtcattagacctgctactcttctttctccatagacttttccgtcttatgaataaatttttatctgtcccaggaaatatatacacacataggtaataatttcattacatactgcaataaatggacaatgtattttaattatgaagagtattaggagtctacaaaggggcttgatgtatttcttcttaagatgtaattttagtaggtaaaacactattttctagtaagacggtatagaaaacacatgagatggtctgtttaattgagaggaaactgcttcctccaacagcactctgagtggcattggttaatgttaagctaacactgaacatggattaagcacagggagtacttagagaacagtggtttgctacccttcccctgtgcacactctgcagtgactcaacgttaagggttgccatgacttgggaactgagaaagagaatatattggaggtgcaaatggacagaggcccagagactaccaaacaacccacaggtcacaacagtccccatactgttttctgcctgaaatgccacaatagcacagtgtggttggagcacccagggtggtcaggatgatgggggtgactgtggggtagggagaagagaccagcctaggagacagaacctaaaccactgtacaagcagtccttgctcccctgaaacagcagaaaagacatgctgtaaacccgagatttcaaacgtatctgcgcgttgttcacatgcatcaagaaattcctggtagggtctcagcttcagggagcaaagctgagctcctgttgcatcagagcttcctggcagttcacctctgttgccccccccccccattacttatctgattctcatgccacttggagcacaattaggcgaaggtacagccatccctgccttccatgattgcagcagttcagcagcctaaaagcctcaagctccatgggtcagcaagatcccatcgtcatcatgcactgttattcaaagtctcttagtttgggaattataaaccacttaactacaaaggttgactagttaagcatctttacttaatttcaatttcccagataggcatcatttaaagacccaggctgcatcaagtgacccttttaaccaggtcagtgattcgtcatctattcgaagctctggaagtctaagaaaaaacatacaataacccacacctcccccacagtcattatatagaaaagagagagaaaaacgtgccctgtcccaccgcgggccccttttgtgctgttcctgccaacgcagcagacctcctgctatatatatagaccctgctcccagccctacacaaccaacagcaccatcccatccgcaaacaccagccatgggaaaggtgagcctagggcgcccagaacgtggggagggacttactcctgggtccagaccacatcaggcctctgacccctgccttgccttacagatcaccttctatgaggaccgaggcttccagggccgccactatgagtgcagcacagaccactccaacctgcagccctacttcagccgctgcaactctgtgcgcgtggacagtggctgctggatgctctatgagcagcccaacttcacaggctgccagtatttccttcgtcgcggggactaccctgactaccagcagtggatgggtttcagcgactctgtccgctcctgccacctcatcccccacgtgagtcccatcctagggccccctggccctcattctcattcttgccctgatcataaccctactttgagctgagggatagggtgcctgacacgttctttgaggggtttctctaggattaggaaaaatggcacaagcctttgaaattcgaaagctcctaaatgtacctgtaacaggctgtgagaactgcttttcagttttcctatataacagaaatggttagcaggccttaaagaaaaagaaaggatagttagaggggtttgtgtgactcgaactttcgcaggatttccaccaatccgtgacttacgtggcatcgccagccattatttaacttttggtgagtcctggtgtgccagcctctgtaaaggtcacatcttggctgcatactcaagttctggaagctacaatactttggatgcacggaggatgggacttttccagcagctgctctctcctcaaactgttgctttggagaatccttcccacagaggacttccagtggtggaagaggacactggagcagacttctaggaaaggacaggaagtgaaggagatcaagctaacagagtgggcaggacaggcagctccaacgtccattgctagaaaaattttaccctcttgatctgcacaggcctcttgagaatatttgacttctttttttggttttacaaacgtgatttgtcagaatacattagagctgagagttgaacttcattctttagttcatttatttacattttgtttgctggtgtttacatggcttctcgggatgcacccaaacttcctatgtatgtagactggcctccaactctgacacttgaaatttttcttacccctgcctcctaagggctaagactacaggcattcaccacatctccctttagacctaaattttgagatgaccttgagccccaggtttaaaaacaaggcctgatagcaatgaatagcctagtaagagcaccagtggaagggaaagcccttggtcctgccaagactgaacacctagtgaacttgattgttggggggagggtggtagtgggggggggatagggaggggaagcccatatagaaggggaggaggaggggttagggggatgttgacccggaaaccgggaaggggaataacaatcgaaatgtaaattagaaatactcaagttagtatatatatataccagagcctgaaagaaaataggttgtgtaactcgaactttcgcaggatttccaccaatctgtgacttacatggcattgacagccactatttacctttttaaatttagtcactttcagcatagaaaaaatagggcacaacactcccctcccaggcacatgtgctggattggcaaacttaggtcaggttttctgacatcctcttctttactgttccttggacgcacagtccagctctcacagaatcaggatctacgagcgagaggactacagaggccagatggtggagatcacagacgactgcccccacctgcaggaccgcttccacttcagtgacttccactccttccacgtgatagagggctactgggtcctctacgagatgcccaactaccgggggcggcagtacctgctgaggcccagagaatacaggcgctaccacgactggggcgccatgaatgccagggtgggctctctgaggagaatcatggattactattgaattgtcttactctgccctttcatcatttggaagttaataaaatatttcctgtgtgttccatgcagcaatggtgtcctctgttcattttggccttcttggaaggctgcagtaaaactggcaacaggaagactgtgggtcttcttataatcaagggaggtcgtgggctgagcagatggggagctcagcctcaggaacctgggccccaatcactgactagctacttgtggtagggcaagcatttccgtacctcagtttcctactttgtgaagacaggagtaataatagtctattaatgaggctttgatgtgaactaaccgtgtttacatttttctatcacggacgatggctttgtcaacagtgtcctggaagctgtcctgtgagtgatcacgtggagcatttgctcttgtagtactaatgttcatcaatcctgaaatgccaatcaggagttgatctgatgcaatcacaccagggtctttaattacaaactgaactcacccacaggatggttctaatggagaaaaagccctgaccactcatcaggacaagggagaggtgagtgtttctagtctggccaggatctaattggggtgctactgtggccttagcataattggttggtgctgggagatcaaccataaacctaacttctgcttccctcctaattagtggtaggggtcagacttgtaacctgcaaatttgttagggaataacttggaaactggtgctagatgcaggatttgttggggaaataacctggcgactcaggtcttactgggtagttacctggaaactgaagctagatacagacctgttagttcacttaagtccggttttataaagtgaagtctgaacaccaaaactttggtctcttactctcaacttcagtgctctgacttaaaactatttggaggtgattgaataaaggggaatgactaagtaaaactgtatcagtggaagaaagagttagagacccatttgtttgcacagtcatgtctgacacatcccaaaaggactaaaactatactactgaagagatgtatatatgttatgtgtgtgtgtgtgtgtgtgtgtgtgtgtgtgtgtgtgcacgcgcattatgctgagagcacagatttaggaaccaaggaccttcttaaaagaagccaaaggactttgtgaaaactcgtttctgttggagctgcactgcagtcggtgacgtgagttgatagaaacaagcacacatcctgcatgagtaaaggctgagagcacatggttagaaatgcaaaactcacaagcatatcagagacctgaaagatattatcccaaactgggatctatatttgtgacacagagctcaccaatagcttttggtgactattttgtccctaagacaagggaaaaggaatgtaggtgcttgtttacagaagctcaagatgactttacagcaaggaaacaaggagtcatgaaatgaaatcaaagcagtgttagcatttcctctagggtatacccagcagtttcctagcaacaaccagagtcaggtatgctataaaggntgttcaggcttctgtccctctccctctcccnccccatnccttcctccncccct

SEQ ID NO: 12794 - protein, 173 aa, Rattus norvegicus
  ref <308>: DATABASE ACCESSION NUMBER: SWISS-Prot / AAA40988
  ref <309>: DATABASE ENTRY DATE: 1991-02-01
GKITFYEDRGFQGRHYECSTDHSNLQPYFSRCNSVRVDSGCWMLYEQPNFTGCQYFLRRGDYPDYQQWMGFSDSVRSCHLIPHSSSHRIRIYEREDYRGQMVEITDDCPHLQDRFHFSDFHSFHVIEGYWVLYEMPNYRGRQYLLRPREYRRYHDWGAMNARVGSLRRIMDYY

SEQ ID NO: 12795 - DNA, 606 bp, Homo sapiens
  ref <308>: DATABASE ACCESSION NUMBER: Refseq / NM_006891
  ref <309>: DATABASE ENTRY DATE: 2001-03-18
gtgcgcccagccagccatggggaagatcaccctctacgaggaccggggcttccagggccgccactacgaatgcagcagcgaccaccccaacctgcagccctacttgagccgctgcaactcggcgcgcgtggacagcggctgctggatgctctatgagcagcccaactactcgggcctccagtacttcctgcgccgcggcgactatgccgaccaccagcagtggatgggcctcagcgactcggtccgctcctgccgcctcatcccccactctggctctcacaggatcagactctatgagagggaggactacagaggccagatgatagagttcactgaggactgctcctgtcttcaggaccgcttccgcttcaatgaaatccactccctcaacgtgctggagggctcctgggtcctctacgagctgtccaactaccgaggacggcagtacctgctgatgccaggggactataggcgctaccaggactggggggccacgaatgccagagtgggctctctgaggagagtcatagatttctcctgaaatatgtcctcctttgttgtttcttaatttggaaactaataaaatattttctgtgtgttcctggc

SEQ ID NO: 12796 - protein, 174 aa, Homo sapiens
  ref <308>: DATABASE ACCESSION NUMBER: Refseq / NP_008822
  ref <309>: DATABASE ENTRY DATE: 2001-03-18
MGKITLYEDRGFQGRHYECSSDHPNLQPYLSRCNSARVDSGCWMLYEQPNYSGLQYFLRRGDYADHQQWMGLSDSVRSCRLIPHSGSHRIRLYEREDYRGQMIEFTEDCSCLQDRFRFNEIHSLNVLEGSWVLYELSNYRGRQYLLMPGDYRRYQDWGATNARVGSLRRVIDFS

SEQ ID NO: 12797 - DNA, 31737 bp, Rattus norvegicus; identical to SEQ ID NO: 3412
  misc_feature (1)..(31737): n=a, c, g or t
  ref <308>: DATABASE ACCESSION NUMBER: EMBL / M19359
  ref <309>: DATABASE ENTRY DATE: 2000-03-04

SEQ ID NO: 12798 - protein, 173 aa, Rattus norvegicus; identical to SEQ ID NO: 3413
  ref <308>: DATABASE ACCESSION NUMBER: SWISS-Prot / P10065
  ref <309>: DATABASE ENTRY DATE: 1991-08-01

SEQ ID NO: 12799 - DNA, 465 bp, Homo sapiens; identical to SEQ ID NO: 3414
  ref <308>: DATABASE ACCESSION NUMBER: EMBL / M17315
  ref <309>: DATABASE ENTRY DATE: 1999-07-02

SEQ ID NO: 12800 - protein, 173 aa, Homo sapiens; identical to SEQ ID NO: 3415
  ref <308>: DATABASE ACCESSION NUMBER: SWISS-Prot / P11844
  ref <309>: DATABASE ENTRY DATE: 1997-11-01

SEQ ID NO: 12801 - DNA, 31737 bp, Rattus norvegicus; identical to SEQ ID NO: 3412
  misc_feature (1)..(31737): n=a, c, g or t
  ref <308>: DATABASE ACCESSION NUMBER: EMBL / M19359
  ref <309>: DATABASE ENTRY DATE: 2000-03-04

SEQ ID NO: 12802 - protein, 173 aa, Rattus norvegicus; identical to SEQ ID NO: 3413
  ref <308>: DATABASE ACCESSION NUMBER: SWISS-Prot / AAA40981
  ref <309>: DATABASE ENTRY DATE: 1991-08-01

SEQ ID NO: 12803 - DNA, 31737 bp, Rattus norvegicus; identical to SEQ ID NO: 3412
  misc_feature (1)..(31737): n=a, c, g or t
  ref <308>: DATABASE ACCESSION NUMBER: EMBL / M19359
  ref <309>: DATABASE ENTRY DATE: 2000-03-04

SEQ ID NO: 12804 - protein, 173 aa, Rattus norvegicus; identical to SEQ ID NO: 3413
  ref <308>: DATABASE ACCESSION NUMBER: SWISS-Prot / P10065
  ref <309>: DATABASE ENTRY DATE: 1991-08-01

SEQ ID NO: 12805 - DNA, 465 bp, Homo sapiens; identical to SEQ ID NO: 3414
  ref <308>: DATABASE ACCESSION NUMBER: EMBL / M17315
  ref <309>: DATABASE ENTRY DATE: 1999-07-02

SEQ ID NO: 12806 - protein, 173 aa, Homo sapiens; identical to SEQ ID NO: 3415
  ref <308>: DATABASE ACCESSION NUMBER: SWISS-Prot / P11844
  ref <309>: DATABASE ENTRY DATE: 1997-11-01

SEQ ID NO: 12807 - DNA, 31737 bp, Rattus norvegicus; identical to SEQ ID NO: 3412
  misc_feature (1)..(31737): n=a, c, g or t
  ref <308>: DATABASE ACCESSION NUMBER: EMBL / M19359
  ref <309>: DATABASE ENTRY DATE: 2000-03-04

SEQ ID NO: 12808 - protein, 173 aa, Rattus norvegicus; identical to SEQ ID NO: 3413
  ref <308>: DATABASE ACCESSION NUMBER: SWISS-Prot / AAA40981
  ref <309>: DATABASE ENTRY DATE: 1991-08-01

SEQ ID NO: 12809 - DNA, 2481 bp, Rattus norvegicus
  ref <308>: DATABASE ACCESSION NUMBER: EMBL / M22366
  ref <309>: DATABASE ENTRY DATE: 2002-01-08
gatctattagacacaaaacctaaccagagaaggaaatatgcggacctgaacctttgcagacaaagcttcctccctctgctcagttgtaagctacttggtctgagccgtctgtgtaccaaagagtggacaaggcagtcaggatagcagaaatcaaacacatggcatcccaccattgtgcggcgcgtgtcacagagggaaagacaggagtgtaacccacactgagagtggtagggagacgcgggtggtggaaatgcatcaaaaacaatgatgttcacggtactcgtcagagcattttctacccgtttgttttaaaacattcttttcctcttcctgttttccactttcccaccatccacctaaattcctcagccgaccacgtaggctcctatggtataactgtgtatcagtatcatgaatccaaaggccagtacacacatgaatttgatggtgacgagagattctatgtggacttggataagaaggagaccatctggaggatccccgagtttggacaactgataagctttgacccccaaggtgcacttcgaaatatagctataataaaacacaatttggaaatcttgatgaagaggtcaaattcaaccccagctgtcaacggtacgtgctcaccaccctgctcccccctcccttccctggggggttaggggatgtgatcaggacattaatggtccaataaaatcctctcctttccaaggagaccccggatctcttcatcactggagactcatcccctctcttcttgtttttaaagatttatttatttattatatctaagtacacggtagctgtcttcggacacaccagagagagggcatcagatcccattacagatggttgtgagccaccatgtggttgctgggaattgaactcaggacctctggaagagcagtcagtgctcttaaccactgagccatctctccggcccatcccttctcttcttaaaaatcacacatttcatgtaatatacagctcactattccacaatgctctcctcgaatcttttggaaaagccccgacagacatcctacctgaactccctagacgagaggggcacagggatcaagtggagggcacattagctccaagcagaggaatcgggctctttgactttcatatgtgtaagacttgtcaagaaggctctctcactagacagtgcagggcttcagggagagaagctcccatcagcctctgacatccagaccatttcctttgcagaggttcctgaggcgaccgtgttttccaagtcccctgtgctgctgggtcagcccaacaccctcatctgctttgtagacaacatctttcctcctgtgatcaatatcacatggttgagaaacagcaagccactcacagaaggcgtttatgagaccagcttccttatcaacagtgactattccttccacaagatggcttacctcaccttcatcccttccaacgacgacatttatgactgcaaggtggagcactggagcctggacgagccggttctaagacactggggtgtgtatgagctctgccacttctggcactttctcgttcactgtcacttctggaacagcatggcttctggcttcaagtgaccaaaactcactttccactcttaaagtttctaaggctagagttcgtgtcatcccattagcccagcctcagagaccagtaggttaactcctcctcacctggtcctgtcttacacatacatgagtcccttctgactcaaagcttctctctctcagaacctgagattccagcccccatgtcagagctgacagagactgtggtctgtgccctggggttgtctgtgggtctcgtgggcatcgtggtgggcaccatcttcatcattcaaggcctgcgatcagtggctccctccagacacccagggcccttgtgagtcacaccctgggaaagaaggtaagggtttgtgtttgtgggaaacaaaggcacgcatggggaggggaaggaaggggagacatgaaagtttgttgttggaactttgctggagcctctgaacccatctttcctgtgtgttttgttgtaggtgcgtggccctctacagggaagatgtagtgtgtgggggtgacctggcacagtgtgttttctggcccaattcatcgtgttctctctcttctcctggtgtctcccatcttgctcttcccttggcccccaggctgtccacctcatggctctcacgcccttggaattctcccctgacctgagtttcatttttggcatcttccaagtcgaatctactatagattccgagaccctgattaatgctccaccaaaccaataaacctcttataagttgtcttctttgtttttctgtctcccattttggagcttactggagccaggcccatgtaatcctgtgtccagtgtcacaggaataaccaatgcagcccagaatggtttggtatcttagccaaggttgactttcaaatttttttgttcagctgacatctcacg

SEQ ID NO: 12810 - protein, 256 aa, Rattus norvegicus
  ref <308>: DATABASE ACCESSION NUMBER: SWISS-Prot / AAA42083
  ref <309>: DATABASE ENTRY DATE: 1991-02-01
MPLSRALILGVLALTTMLSPCGGQDDIEADHVGSYGITVYQYHESKGQYTHEFDGDERFYVDLDKKETIWRIPEFGQLISFDPQGALRNIAIIKHNLEILMKRSNSTPAVNEVPEATVFSKSPVLLGQPNTLICFVDNIFPPVINITWLRNSKPLTEGVYETSFLINSDYSFHKMAYLTFIPSNDDIYDCKVEHWSLDEPVLRHWEPEIPAPMSELTETVVCALGLSVGLVGIVVGTIFIIQGLRSVAPSRHPGPL

SEQ ID NO: 12811 - DNA, 907 bp, Homo sapiens
  ref <308>: DATABASE ACCESSION NUMBER: EMBL / X00033
  ref <309>: DATABASE ENTRY DATE: 1995-03-30
aggctgccttgggaagaagatgatcctaaacaaagctctgatgctgggggccctcgccctgaccaccgtgatgagcccttgtggaggtgaagacattgtggctgaccacgttgcctcttacggtgtaaacttgtaccagtcttacggtccctctggccagttcacccatgaatttgatggagacgaggagttctatgtggacctggagaggaaggagactgtctggaagttgcctctgttccacagacttagatttgacccgcaatttgcactgacaaacatcgctgtgctaaaacataacttgaacatcctgattaaacgctccaactctaccgctgctaccaatgaggttcctgaggtcacagtgttttccaagtctcccgtgacactgggtcagcccaacaccctcatctgtcttgtggacaacatctttcctcctgtggtcaacatcacctggctgagcaatgggcactcagtcacagaaggtgtttctgagaccagcttcctctccaagagtgatcattccttcttcaagatcagttacctcaccttcctcccttctgctgatgagatttatgactgcaaggtggagcactggggcctggatgagcctcttctgaaacactgggagcctgagattccagcacctatgtcagagctcacagagactgtggtctgtgccctggggttgtctgtgggcctcgtgggcattgtggtggggaccgtcttgatcatccgaggcctgcgttcagttggtgcttccagacaccaagggcccttgtgaatcccatcctgaaaaagaaggtgttacctactaagagatgcctggggtaagccgcccagctacctaattcctcagtaacatcgatctaaaatctccatggaagcaataaattccctttaagag

SEQ ID NO: 12812 - protein, 254 aa, Homo sapiens
  ref <308>: DATABASE ACCESSION NUMBER: SWISS-Prot / CAA24917
  ref <309>: DATABASE ENTRY DATE: 2001-10-16
MILNKALMLGALALTTVMSPCGGEDIVADHVASYGVNLYQSYGPSGQFTHEFDGDEEFYVDLERKETVWKLPLFHRLRFDPQFALTNIAVLKHNLNILIKRSNSTAATNEVPEVTVFSKSPVTLGQPNTLICLVDNIFPPVVNITWLSNGHSVTEGVSETSFLSKSDHSFFKISYLTFLPSADEIYDCKVEHWGLDEPLLKHWEPEIPAPMSELTETVVCALGLSVGLVGIVVGTVLIIRGLRSVGASRHQGPL

SEQ ID NO: 12813 - DNA, 842 bp, Rattus norvegicus
  misc_feature (1)..(842): n=a, c, g or t
  ref <308>: DATABASE ACCESSION NUMBER: EMBL / M22670
  ref <309>: DATABASE ENTRY DATE: 2000-03-04
acaatgagtatccattgcccatagcctactaatgcttaacatgacctattaattgtttgaaatgagttaattaaaacaaattgaaaaaattttaatttcgtagaacctattgtttacacacacacacacacacacacacacacacacacacacacacacatatatatatatatatatatatatatatatatatatatatatatatacaggtagtaagaaatggtatttttccaagccaacatgattttgtgtaaagtagatataagagagagagagagagagagagagagagagagagagagattgagattctatatatgttgatttagcccatgtaaactagaattgagaatatttcagaacattataaaattcttttttttttctttcagattcctctactgtacattcaggtgagtaacacaaatagtccacagatagagaaaacacaaacatttcacgggaaaccttctttgagtntttcttacaataggcctgacacttaagggaagggattacttcccagcacaaccaggaatgtcatgactgaattcacctgtcctctgggcctttctcatttgccttctttatggataacacggaagttcacatagatttctttcataatctatggtgttctttgcattttaatgaatcatggttatttattacaggatcccaaaaacaatcgcattgcacaatggcagaatttcaatttagagggtggcctcaaacagctgtccttccccctctcctcagagcccactcagggctcctacaaggtggtgatacgtacagaatcaggcaggaccgtcgagcaccctttctctgtggaggaattc

SEQ ID NO: 12814 - protein, 1472 aa, Rattus norvegicus; identical to SEQ ID NO: 3447
  ref <308>: DATABASE ACCESSION NUMBER: Refseq / NP_036620
  ref <309>: DATABASE ENTRY DATE: 2002-11-05

SEQ ID NO: 12815 - DNA, 4576 bp, Homo sapiens; identical to SEQ ID NO: 6289

SEQ ID NO: 12816 - protein, 1474 aa, Homo sapiens; identical to SEQ ID NO: 6290

SEQ ID NO: 12817 - DNA, 842 bp, Rattus norvegicus; identical to SEQ ID NO: 12813
  misc_feature (1)..(842): n=a, c, g or t
  ref <308>: DATABASE ACCESSION NUMBER: EMBL / M22670
  ref <309>: DATABASE ENTRY DATE: 2000-03-04

SEQ ID NO: 12818 - protein, 1472 aa, Rattus norvegicus; identical to SEQ ID NO: 3447
  ref <308>: DATABASE ACCESSION NUMBER: Refseq / NP_036620
  ref <309>: DATABASE ENTRY DATE: 2002-11-05

SEQ ID NO: 12819 - DNA, 4576 bp, Homo sapiens; identical to SEQ ID NO: 6289

SEQ ID NO: 12820 - protein, 1474 aa, Homo sapiens; identical to SEQ ID NO: 6290

SEQ ID NO: 12821 - DNA, 5184 bp, Rattus norvegicus
  ref <308>: DATABASE ACCESSION NUMBER: EMBL / M22993
  ref <309>: DATABASE ENTRY DATE: 2000-03-04
aattcattacgacttaagagccttgcatggcaatggtgtgcctataatcctacttctatggagttagaaggaccaaatcccttgggattcctgtgttagatggtttaacctaatttacaactttcagcatcaagaaaaatgtctcaataagcaaggtaaaaatgacccaagacctctgtcctctttacaaacaagtaaacacatgcaagtgctcataaaaacatagacatatgtactcagatacactcacacagacacagacacacagacacacacagacacagacacagacacagacacacacacacacagagagacacacaaggcatgaaagagaggaaaaagagaaaaacattgattaacatttaatctttctgaaatgacagtttttcccagcaccagatactcatgatgccaggacagaatctgagagcactctcaagatgtagctataaattaaattagtaaggggtttataaaggcaaaactaacaagggtatgtacttaatgcttaagtgcagccagccacacatccggcctacatgcagaaaagcacacatctttcatgctgtcagaggcaagcaaacttgtttacaggagtgaaaacacgtgatgtgttatcttacataaacaaatcaggtaattccaggtataattctcacattctaggaatgtcatctgtcctagggcaagtggggctcacaggttagagccattttgttttgtattaatttttaaacttttaaacataatatccaccattgcacaatattctatcttttctgatagtttttgtttgttttcagtatgtctggcaaatatgtgtctcttgatcgacataccttagacataactgatatttttaagttaaaatgcaaaactgcctcatgttgtttttgtttcttgtattaggatcttcacacataactcgaagcactaaaatgtacaataaatcttgatgcatgtcctgtttctcccacacctgggtgtctctgactcgcatggtcagtgtgagagaccagaccaactccagcctgggttcaggctccatcttagagagcctggcctaaggttgaactcaagttacccagcaagcctgcatctagcactagtttcctattgattaatttgggttcagaggtccagcaatgaaatacataagttttatgttgtttttcctttcaaacccgggcatatctctgtgaaagctctagctgtcctgaactaactttgtagagcaggctctcctcatgaactcccagagatgtgcctgcctctgcctcctgagttttggggctaaaggcatgcaccagcctgccaggcataagttttatttttttcatcccttacatgtttccattgcatgcccttctagcatgttctttctttctactcaatgcctcaccattaatgttgattcagcttatgctacgcctcactctcaagccaatgtcacaggatctttgcaaaactaaacagccctatgacctagactagaaattctaatgtggttcccaactcatacttaataaccttccaaaggaaccgagctgcgtcccaaatactggtacctcatcattttacacaatcacctgtagttgcacaggttacacttggcctcctagtaaaccgcagagatagatgcatgcttctagatgaggtttctgttctaacaaagaagattcatgcacagtgacttgtagcagaggagtttttgagcttgcccagtttccacagtcccccttttatacacaagacacagaaaagtagatacttgaatgatcagagccaggagaacttaaaatctccaacctggaccactctagtgactctcaaataagaaaggagagaaacggagatgccacatcccagagcgtgctactagattctaagtgagtagaagagagtgaggtggtaaatgtcacacaatcatagcagagtcatgcacggagaaggcttactggtcattaaattgagaaagtctgctctaattcagactaagcaaaatctgtgtccttgatcctttaccaacactgtccacagatcccctggcacatttcgtgcaactggtgtaatttatttgagttgtgctcaggccagcactgaacacagtgacattcacagagaacaaatattctattttgctatttgaacaccttgggcagagttctgtttacagagaggactcataaataagccgctgtggattggaggactctggaagcagtgttaaggaagaggacagcataagccctgtcctcttgtcttactgtcgtcctgtcctcctgtccttccatcatgaagaaggacagagaggctcagctgtgccttttttcagctcttcttgccttcctgccttttgcttccttgctcaatggaaactcgtgagtaccaccaagaccctcttccacatcatccctcctccaatcggaaactatccatttccattcacagttcctttccctgaaaaaactcacaaattctttttactttttaattaacaattatgtgtgtgtatatgtatatatgattgcaattatacacatacaattcttacctgattctaggtgatcttttttccaattctaaagcaaccagtgttactaaactgtgtggtatgatttagaatagtattcctcttattactgaacaaggagtgtctcaaatcccaatcatcagagaattctcaggtgttgaaactatttaagcactttgtaaataagcattttaatgggttggaaatgtgtagcctatggttcaaccatgagacggatgagatgtctggcacatcagaaccctgtggatgtttgtgtcctaaaacaatactcttgttacgatcaaagactttggattaaactaccaatagaactttttatttgatggtcaaaataaccatataattaggattatattgttgagtgattttatttgtatctgtgaccagaaaaatatatttaaggtggtaaaattaaaaagcaaactagtggtatttttgcatagtgtgatatagcaatgactggctagatttggagggcaaacatccctaattataggaaaagataaagaatgattcccacagacagacttcggcacttgctcaagtgtaacataggtaaattatgcaagtttgaatttcacagtcaggtcataaacctttatttgaaaagtaccccaaaataaaaaatagggtattgagttatttttaaggattaaaatggtagtgaaaaacaatcatgataaatttctatgaaaagaacaattattcctcctggattttcatttaaaaaataaacctttctagaacgtgcatgctggttgcttagtgacaggagtgcacgccattcaaacctgccctggcaggtatcactgctgaaggtggtgattgacgagctaataattgtcttgccactctgctgtgtgacaaactgtgacactgccacactgtcaacctgacatctcagactgttgaaacatggatggtaatggtgactgtgatgaaactccagttatagacaatgacatctgtcgtcagctgtccggaaccccttcctttccaggaagtatatggtgctggtcccgtcccagctctacaccgagacccctgagaaaatctgcctgcatctataccatctgaatgagacagtgactgtgacagcttccttgatatctcaaaggggaacgagaaaactgttcgatgagcttgtggttgacaaggacttgttccactgtgtttccttcactgtgagtactaagtatccgtcctgatttgtttacatacttatgcacatgcgtgtgagtatgtacatacaatacccatacatgtttccaaaaaatgttattctagaaacatatctgtgatctcaaaacaataggattttagaacatttacccaataaacaaatagaatacatcattccaccacaaaatgagaagtcaaaacttgtcccattgaattccctcaaaaagcccacagaccagagaaagaaagggttctccagttcatagcacttcctgctaataagttaataaactttcaaacagcactccagataattaggttcacagctcctatgcataatcctgagatcctgaataagtgatgggtttcttctttgggacctatcctcaagacataattcttaccaccattaatacattatcttattctctacctcagtttgagagttagagctaagtttcttttgtgtcttagaggtaattttcaatgaagattatatttactctgtaaagatgactgtgtttttgttgttcacataaactcccactgacatacagaaaatgatttttcttttcatccctttcttttcctggcaatttttccctccatgtaatacttaaacagaaactgatggtgcctccacctccatcagagaaaaggttaatgaggtactgtaagaaaggcagagggagatggtgaagggtctgtgttcctgtcgttctcagatccctagattgccctcttctgaagaggaggagtcactcgacatcaacattgaaggggcaaagcataaattcagcgaaaggcgtgtggtgcttgtgaagaacaaagaaagtgttgtctttgtccagactgataagcccatgtacaagccaggacagtcaggtatgaagctccacggtgggcaaaggaattaatacaccaccctaaacatggtgtgaagaaggcctgggtctttggaactcactagaaaattctctttttccagttaaatttcgggttgtctctatggataaaaatctacaccccctgaatgagttggtgagttttttacctatgggtattggtgggttcttcaagacaaaatgtcacagcaacattctaatttccagctccttctgagacgtgggttagcccttttttctattctgttcctttgccactttatagcctcagctcttctaccattggccatcctatggcttccttatatgtgactgtccttatttggactccatttgactggataagtatctctggattgtcttcatactctgtggagccttatactgtatagaaccttttaggtttttcagtcatttcttttctagattctgttaccatccctcagaaatctattcctagtgtgacagggatatttttcacacagtctctattattttataacctcatatttaacacttgggttcttccctagatgaatt

SEQ ID NO: 12822 - protein, 143 aa, Rattus norvegicus
  ref <308>: DATABASE ACCESSION NUMBER: SWISS-Prot / AAA79025
  ref <309>: DATABASE ENTRY DATE: 2000-07-04
MKKDREAQLCLFSALLAFLPFASLLNGNSKYMVLVPSQLYTETPEKICLHLYHLNETVTVTASLISQRGTRKLFDELVVDKDLFHCVSFTIPRLPSSEEEESLDINIEGAKHKFSERRVVLVKNKESVVFVQTDKPMYKPGQS

SEQ ID NO: 12823 - DNA, 4615 bp, Homo sapiens
  ref <308>: DATABASE ACCESSION NUMBER: Refseq / NM_002864
  ref <309>: DATABASE ENTRY DATE: 2000-10-31
ggacacaaccctgagatttatccctcacaatgcggaaagacagacttcttcatttatgtcttgtgctacttcttatcctgctttctgccagtgactcaaactctacagaaccgcagtatatggtgctggtcccctccctgctccacactgaggcccctaagaagggctgtgtccttctgagccacctgaatgagacagtgactgtaagtgcttccttggagtctggcagggaaaacaggagcctcttcactgacctggtggcggagaaggacttattccactgtgtctccttcactctcccaaggatctcagcctcttcagaggtggcattccttagcatccagataaaggggcctacgcaagatttcaggaagaggaacacagttctggtactgaacacccaaagtctggtctttgtccagacagacaaacccatgtataaaccaggacagacagtaagattccgtgttgtctccgtggatgaaaattttcgccctcgaaatgaactgattccactgatataccttgagaacccaagaagaaatcgaattgcacaatggcagagtctcaagctagaagctggcatcaatcagttgtcctttcccctctcatcagagcccattcagggctcctacagggtggtggtacagacagaatcaggtggaaggatacagcaccccttcaccgtggaggaatttgtgcttcccaagtttgaggtcaaagttcaggtgccaaagataatcagtatcatggatgaaaaagtgaacataacagtctgtggagaatacacttatgggaagcctgtcccaggacttgcaactgtgagcctgtgtagaaaattatctcgtgttcttaattgtgacaagcaggaggtctgtgaggaattcagtcaacagcttaacagcaatggctgcatcacccaacaagtacacaccaaaatgctccagattacaaatacgggctttgaaatgaagcttagagtggaagccaggatcagagaagaggggacagacctggaagtcactgcaaacaggatcagtgaaatcacaaacattgtatccaaactcaaattcgtgaaagtggattcacactttagacaaggaatccccttttttgcacaggtgcttctggtggatggaaaaggtgtgcccatccccaataaactcttcttcatctctgtgaatgacgccaattattactccaatgcaaccaccaatgagcagggtcttgcacagttttcaatcaatactaccagtatctcggttaataaactttttgtccgggttttcactgtgcatcccaacttgtgttttcactattcatgggtagcagaagaccaccagggcgctcagcacactgcaaatcgtgttttctccttaagtggaagttacattcacctggagcctgtggctggtaccctgccctgtggccacacggagactatcacggcacactatacactgaatagacaggccatgggagagttatcggagctcagtttccattacctgatcatggctaagggagtcatcgtcagatctggaacccacactctgcctgtggagtcaggagacatgaaaggcagttttgccttatccttccctgtggagtcagacgttgcccccattgcacgaatgttcatctttgccattttaccagatggagaagttgttggagactctgaaaaatttgagattgaaaactgtctagccaacaaggtggatttgagcttcagcccagcacaaagtcccccagcctcacatgcccacctgcaagtagcagctgctccgcagtccctctgtgcccttcgtgctgtggaccaaagtgtgctgctcatgaagcctgaggctgagctctctgtgtcctcagtatataatctgctaactgtgaaggatctcaccaattttcctgacaatgtggaccagcaggaggaagaacaaggacactgtccccgtcctttcttcattcataatggagccatctatgttcccttatcaagtaatgaagcagatatttatagcttcctcaaggggatgggattgaaggtgttcactaactcaaaaatccgaaaaccaaagtcgtgttcagtcatcccttccgtgtctgcaggagcagtaggtcaaggatactatggagcaggtctaggagtagtagagagaccatatgttcctcaattaggcacatataatgtgatacccttaaataatgaacaaagttcagggccagtccctgaaacggtgcgaagctattttcctgagacttggatctgggagttggtggcagtgaactcatcaggtgtggctgaggtaggagtaacagtccctgacaccatcaccgagtggaaggcaggggccttctgcctgtctgaagatgctggacttggtatctcttccactgcctctctccgagccttccagcccttctttgtggagctcacaatgccttactctgtgattcgtggagaggtcttcacactcaaggccacggtcctaaactaccttcccaaatgcatccgggtcagtgtgcagctgaaagcctctccagccttcctagcttcccaaaatacaaagggagaagaatcctattgtatctgtggaagtgagagacaaaccttgtcttggacagtgactcctaaaactctggggaatgtgaacttctcagtgagtgcagaggcaatgcagtccttagaactctgtggaaatgaggttgttgaggtccctgagattaaaagaaaagacacagtcatcaaaaccctgttggtggaggctgaaggtattgagcaagaaaagactttcagttccatgacctgtgcctcaggtgctaatgtgtctgagcagttgtccttgaagctcccatcaaatgtggtcaaagaatctgccagagcttctttctcagttctgggtgacatattaggttctgctatgcaaaatatacaaaatctcctccagatgccatatggctgtggagaacagaacatggtcctatttgctcctaacatctatgtcttgaactatctgaatgaaacccagcagctgacgcaggagatcaaggccaaggccgttggctatctcatcactggttaccagagacagctgaactacaaacaccaagatggctcctacagcacctttggggaacgatatggcaggaaccagggcaacacttggctcacagcttttgtactgaagactttcgcccaggctcgatcctacatcttcattgatgaagcacacattacccaatctctcacgtggctctcccagatgcagaaggacaatggctgtttcaggagctctgggtcactgctcaacaatgccataaagggaggtgtagaagatgaagcgaccctctccgcctatgttactattgcccttctggaaattcctctcccagtcactaaccctattgttcgcaatgccctgttctgcctggagtcagcctggaatgtagcaaaggaggggacccatgggagccatgtctacaccaaggcattgctggcctatgctttttccctactgggaaagcaaaatcagaatagagaaatactgaactcacttgataaggaagctgtgaaagaagacaacctcgtccattgggagcgccctcagagacccaaggcaccagtggggcatctttaccaaacccaggctccctctgctgaggtggagatgacatcctatgtgctcctcgcttatctcacggcccagccagcccccacctcaggggacctgacctctgcaactaacattgtgaagtggatcatgaagcagcagaacgcccaaggtggtttctcctccacccaggacacagtggtggctctccatgccctgtccaggtatggagcagccactttcaccagaactgagaaaactgcacaggtcaccgttcaggattcacagaccttttctacaaatttccaagtagacaacaacaacctcctattactgcagcagatctcattgccagagctccctggagaatatgtcataacagtaactggggaaagatgtgtgtatcttcagacatccatgaaatacaatattcttccagagaaagaggactccccatttgctttaaaagtgcagactgtgccccagacttgcgatggacacaaagcccacaccagctttcagatctcactgaccatcagttacacaggaaaccgtcctgcttccaatatggtgattgttgatgtaaagatggtatctggttttattcccctgaaaccaacagtaaaaatgcttgaaagatctagctctgtgagccggacagaagtgagcaacaaccatgtcctcatttatgtggaacaggtgacaaatcagacgctaagtttttccttcatggttctgcaagacatcccagtaggagacttgaagccagcaattgttaaagtctatgattactatgagacagatgagtctgtggttgctgagtatatcgccccctgcagcacagatacagagcatggaaatgtttgaggaccatacaggctgtatattttggtggattctctgtcctatacatttacttagaaggaatggagttatttgtctctataaaatagacactaaaaatatttgctgaataaatatgtacttctggtcaaactaaaaaa

SEQ ID NO: 12824 - protein, 1482 aa, Homo sapiens
  ref <308>: DATABASE ACCESSION NUMBER: Refseq / NP_002855
  ref <309>: DATABASE ENTRY DATE: 2000-10-31
MRKDRLLHLCLVLLLILLSASDSNSTEPQYMVLVPSLLHTEAPKKGCVLLSHLNETVTVSASLESGRENRSLFTDLVAEKDLFHCVSFTLPRISASSEVAFLSIQIKGPTQDFRKRNTVLVLNTQSLVFVQTDKPMYKPGQTVRFRVVSVDENFRPRNELIPLIYLENPRRNRIAQWQSLKLEAGINQLSFPLSSEPIQGSYRVVVQTESGGRIQHPFTVEEFVLPKFEVKVQVPKIISIMDEKVNITVCGEYTYGKPVPGLATVSLCRKLSRVLNCDKQEVCEEFSQQLNSNGCITQQVHTKMLQITNTGFEMKLRVEARIREEGTDLEVTANRISEITNIVSKLKFVKVDSHFRQGIPFFAQVLLVDGKGVPIPNKLFFISVNDANYYSNATTNEQGLAQFSINTTSISVNKLFVRVFTVHPNLCFHYSWVAEDHQGAQHTANRVFSLSGSYIHLEPVAGTLPCGHTETITAHYTLNRQAMGELSELSFHYLIMAKGVIVRSGTHTLPVESGDMKGSFALSFPVESDVAPIARMFIFAILPDGEVVGDSEKFEIENCLANKVDLSFSPAQSPPASHAHLQVAAAPQSLCALRAVDQSVLLMKPEAELSVSSVYNLLTVKDLTNFPDNVDQQEEEQGHCPRPFFIHNGAIYVPLSSNEADIYSFLKGMGLKVFTNSKIRKPKSCSVIPSVSAGAVGQGYYGAGLGVVERPYVPQLGTYNVIPLNNEQSSGPVPETVRSYFPETWIWELVAVNSSGVAEVGVTVPDTITEWKAGAFCLSEDAGLGISSTASLRAFQPFFVELTMPYSVIRGEVFTLKATVLNYLPKCIRVSVQLKASPAFLASQNTKGEESYCICGSERQTLSWTVTPKTLGNVNFSVSAEAMQSLELCGNEVVEVPEIKRKDTVIKTLLVEAEGIEQEKTFSSMTCASGANVSEQLSLKLPSNVVKESARASFSVLGDILGSAMQNIQNLLQMPYGCGEQNMVLFAPNIYVLNYLNETQQLTQEIKAKAVGYLITGYQRQLNYKHQDGSYSTFGERYGRNQGNTWLTAFVLKTFAQARSYIFIDEAHITQSLTWLSQMQKDNGCFRSSGSLLNNAIKGGVEDEATLSAYVTIALLEIPLPVTNPIVRNALFCLESAWNVAKEGTHGSHVYTKALLAYAFSLLGKQNQNREILNSLDKEAVKEDNLVHWERPQRPKAPVGHLYQTQAPSAEVEMTSYVLLAYLTAQPAPTSGDLTSATNIVKWIMKQQNAQGGFSSTQDTVVALHALSRYGAATFTRTEKTAQVTVQDSQTFSTNFQVDNNNLLLLQQISLPELPGEYVITVTGERCVYLQTSMKYNILPEKEDSPFALKVQTVPQTCDGHKAHTSFQISLTISYTGNRPASNMVIVDVKMVSGFIPLKPTVKMLERSSSVSRTEVSNNHVLIYVEQVTNQTLSFSFMVLQDIPVGDLKPAIVKVYDYYETDESVVAEYIAPCSTDTEHGNV

SEQ ID NO: 12825 - DNA, 412 bp, Rattus norvegicus
  ref <308>: DATABASE ACCESSION NUMBER: EMBL / M23889
  ref <309>: DATABASE ENTRY DATE: 2000-03-04
cttggatgttagtgctcagactatccatcaatggccagctgtcaaggtccaggctgtgggcagtccactctctctgcagtgcaccgtaaaggggacatcaaaccccaacctttactggtactggcaggctccaggagggacccttcagcaactcttctactcttttaatgttggccagtcagaattggtggtgcagcggaacctctcagcttccaggcccaagagtgaacagttcatcctgagcactgagaagttactcctcactcactctggcttctacctctgtgcctggagtccaggacagggctcatatgagcagtatttcggtcccggcaccaagctcacggttttagaggatctgaaaacggtgactccacccaaggtctccttgtttgagccatcagaagcagag

SEQ ID NO: 12826 - DNA, 309 bp, Homo sapiens
  ref <308>: DATABASE ACCESSION NUMBER: EMBL / AJ301409
  ref <309>: DATABASE ENTRY DATE: 2002-07-16
gtgggcagcccgctctctctggagtgcactgtggagggaacatcaaaccccaacctatactggtaccgacaggctgcaggcaggggcctccagctgctcttctactccgttggtattggccagatcagctctgaggtgccccagaatctctcagcctccagaccccaggaccggcagttcatcctgagttctaagaagctccttctcagtgactctggcttctatctctgtgcctggaacttcggacagggggacgagcagtacttcgggccgggcaccaggctcacggtcacaggtgagattcgggca

SEQ ID NO: 12827 - DNA, 412 bp, Rattus norvegicus; identical to SEQ ID NO: 12825
  ref <308>: DATABASE ACCESSION NUMBER: EMBL / M23889
  ref <309>: DATABASE ENTRY DATE: 2000-03-04

SEQ ID NO: 12828 - DNA, 309 bp, Homo sapiens; identical to SEQ ID NO: 12826
  ref <308>: DATABASE ACCESSION NUMBER: EMBL / AJ301409
  ref <309>: DATABASE ENTRY DATE: 2002-07-16

SEQ ID NO: 12829 - DNA, 372 bp, Rattus norvegicus
  ref <308>: DATABASE ACCESSION NUMBER: EMBL / M23890
  ref <309>: DATABASE ENTRY DATE: 2000-03-04
actatccatcaatggccagctgtcaaggtccaggctgtgggcagtccactctctctgcagtgcaccgtaaaggggacatcaaaccccaacctttactggtactggcaggctccaggagggacccttcagcaactcttctactcttttaatgttggccagtcagaattggtggtgcagcggaacctctcagcttccaggcccaagagtgaacagttcatcctgagcactgagaagttactcctcactcactctggcttctacctctgtgcctggagtctagacagcaaaacaccttgttcttcggtgcaggcacccgactgtcggtgctagaggatctgaaaacggtgactccacccaaggtctccttgtttg

SEQ ID NO: 12830 - DNA, 31737 bp, Homo sapiens
  ref <308>: DATABASE ACCESSION NUMBER: EMBL / U66061
  ref <309>: DATABASE ENTRY DATE: 1998-12-01
gatccagagagatttccagaaaaagaccaaccctgagaccccagcaaggctgcagagaagatggattccaaacttcatgccatttaaagcaccagacatgtaatttaaagaaacagtcttccaaaggtagtgctttacagggaggggaaaaaaaggcaaagaggaagaaagagggtcttctggcaattcaatagtgaggagaaaaagaggaaaaaggggaaaactgagaattctgcaaaacaaaaggaaatcacaaatcaagaggacccacaaccagccccactacgaaaacaaacaaagctcactaaggagtctggattttgctagaatgatggccaaaggaacattagactaggaattttgtaaaacacctcaataacacgaaaatgagcaagatgaaagtaatacccgtacaacaaaggaaaacatctcacctctgttccctgttccctcatctcaaaagcaatcatgagtcagaagataatgtaagtctacactccaaacagaaataaatacactcaaggaagcagctgaggatataagtgaccataaccagaccaggactttaaaaactcagactacaaatggccaaaatgggaagacatcagaaaaaaacacaaattgattgaacccaggagggacatgaaagaaaaagacaaagttatcccagtcatgcaaaataaaagatgaccaagggagaataaacccaaatgaaaatttagtcaggacattgaacaaaggcaaagaaacaagtagcagaatgagaaggacatgagtgaaaccagccagttagaaggcggtcaaagaaggcgaggtcttggtatgattgcatgaggggcctggaacagcagcactgggctctgtgcagcaggacggctaagcagcaggttgtcacagtggccacagcactactggccagaccccaggagtcacagtttccctgagagagctgagggcataaacaatgataagttctccaggggatggacttcttaaatactctgagttcatcattacacattctatgcatgtagcaaaataccacaggcacccacaaataggtacacatattatgtatcaatgtttttttaaaaaaaggaaaaataaatgaattccacattcttgtataatcagagtatctacagcgctcctggagtaacccaaaccttatggttgctggaaagataaaaaaccaatgggccaattggggtgaaactctggcccggaaacgtggggtgccagccccctcagcacagatgcaatgcagagttatgggaggtgcgaatgactctgctctctgtcctgtctcctcatctgcaaaattaggaagcctgtcttgattatctccaggaacctcccacctcttcattccagcctctgacaaactctgcacattaggccaggagaagcccccgagccaagtctcttttctcattctcttccaacaagtgcttggagctccaagaaggccccctttgcactatgagcaaccaggtgctctgctgtgtggtcctttgtttcctgggagcaagtgagtcctgggttcagggagaaaattcctatctggagtgctgcaagttccaaatctaaggcctccccgagggacagcagcatcaggcgcctccctgggctgtactcaggcatgcctctctttcttttccagacaccgtggatggtggaatcactcagtccccaaagtacctgttcagaaaggaaggacagaatgtgaccctgagttgtgaacagaatttgaaccacgatgccatgtactggtaccgacaggacccagggcaagggctgagattgatctactactcacagatagtaaatgactttcagaaaggagatatagctgaagggtacagcgtctctcgggagaagaaggaatcctttcctctcactgtgacatcggcccaaaagaacccgacagctttctatctctgtgccagtagtatagacacagtgaagcacggatgtcgcctctctgtgcataaatgtgcccagtcctgcttccccgaccaggtgacagggctcctctgcactctatgatggcaggaaacgccactcagccactaagcaggtttaaaaaactgtatataactaaaactctatatataaactatgcatataaaactaaactatatatgtatacatttatatataactaaaactttatatgagactaaaatgatagttttatatagttttttaaagtatagttttatatatatataactatatatatatatcattttttaaactatagttttgtagttttatttatttatttactttttggagatggagtctcactctgttgcccaggctgcagtgcagtggcatgatctcagctcactgcaatctctgcctcctgggttcaagcaattttcctgcctcagcctcccaagtagctgggattacaggtgcataccaccacacctggctaatttttgtattttagtagaggcagggtttcaccatgttggccaggatggtctcgaactcctgacctcaggtgatccacccacctcggcctcccaaagtgctgggattacaggcatgagtcaccgtgcctggctgttttatagtttcatatagttatttttaaaaactatataaaagtttttgtatagccacttagtggctgagtgaagtttcctgtcatatatgatatagatatagatatgtttatatatgatatagatacagatatgttatatatatgttatatgttgtatataagatatatacatatagagagagtcagagagacacagagaagaaggaaaagttaatcttacaacccccagcttttttctattttaccgaatgctagatgaatagatggatgaatgaatagaaatgaatgaatgaatagaaaattttcccttctttcaggaagataaaaaagcctgtggaaagagagatgtagaagacaaaccctgtaatcacaatttcatatgacgcgtgctttaatgagagacgttagtggagtataggaagtaacacagccaattctgtctggtgacatcaggaagggcgtcaaacagaaagcaaattttgagatgaaagttattattcaaatttcaccagatgggcaagtaggatttcaccagatgggcaagcaccaaaagagggaggcaggctaagggaactatgaaaggaaagagtgatgagataataccaggaaaaaaattatcaacactccctcctccaccggaatatggcaatggaggaaaatttggacaaatgaatggagtcaagttattgaacaaaactgagtttcttgttctagtggtccttcattggatatctgtgtagaaacatccaagaggctccgtaagtgcaggtctggcacttagaagagagggttgggcttgagagaaatgtttgagtgatagttaagcacacaggtgtgagtaaaacttcccaggtgatcttgtcttctatgctttctctctttatgctctgccacctatgccttgaattagaaggtaagtggtgtaagtggtgttatttcttatgttgacttacacatgtctatttgatcatataattacatttctggaaattgatgtttctatgttattcttcaaatacaactaaaactgctggttgaaaatttttgtaaaatattgtcagaagcatcaaataaccttagtctgtcctgctgtattgtcctttttttccagggataagaaatttttagaaaaatatgagtccctgtccagaatacacaagccttggctccacgaattttcttcgaattatttcctggattctgtgtttagctttggatttcttcttctacatagcctatgggagtttgactcacacagagtcccacagaaaccaaaatactaaaacatagagatggaaaagacagttctccctgaaaaggatctaaagaacattaaaacatggtatcatgagaactacaaccagtcattgaaactaatgttttctgacggtagtaagtaaaacactggaaatgagatggctctaagctacttcactttgaacgttcagaccatattcacagatgcctacacatcagtcattctctgagccagaggatggagccaaggaccttcatggcggtgggaaagacacagtcccatagtgctatctgtgccctgtatacaagccattttccagaggtgatgggattgggaaagactgtctgtccaatgagaggaagaaaacgaaagggaagacagtaagagatagacaatcttgtttttccttgtttttcttgtccgtgactagaatggacacaaattcctttgtttcagttgaggaatttattaaagcagggcataagagcttaaatagacttcaaaaattctactgtaaaactattaaccatttgcttttttcagggtaatcttaatactgaaaagaacactgtagctatgaagtttcatcataatctccattcccacaaccaggttgtaagagagatatcatctgaagtgaaggacaggaaatttttaaaatgtaaaatatcactgaatgttttcttagcaagttttgagaggccatcgcatctattaaataggaagataatttatataaaattttaatctagaactgtatttctttaacataataaacataattgctctatttaaaatcacattgaacataacaaattgtaaattagacaagtcagaaaaccaatttgtcaactgtttaaaaattgaagaaatagtccagaattcttaggaagcagaaagggatatttaacgtgtgagaaaaaggtactaccacaatagcagctttattcccaatggctccaaattggaaaatattcaacatctgacaatgcaatggagaaatgattgtgttacatttatgtaacagaatacaatatagcacaaaaaatcaagtgtaatttccaacacagatatttcaaatataacattgaataaaatatagtagacacaaaataatacagtatgtagtcagaatagtgattaaatttggtagcattatgtatttattctgagggagacatgaggaaggcttttggaattctaaattctatatcttgatctgggtgatgattacatgagtatattcatttcaaaaattcattgggctgaacacttaagatttgtgcagtctatgtattttatacctcacttagaaaacttaaaatggcaagtatattatcttgaccaataatctattgctgtgtgacaaaccactccaaaagttagtgatttaaaagaacaacatattattatctcttgtgattctgtagaagggctcagctggacagttctcacttagggctgctcacatggtcactgtcagatagtcactgaggctgaagatatctgaagactcaactaggctgaatatccaaggtggcttttttgtgcccctgttggttcgttacctgggatggctgcagtagctgtggacccgctgagcatttctctctgtacacagccttttgatgtgattagatgagctgtctcacagcatggtggcctctaggcagctaaagttttggcatggtcgttgaccaccctaactgtgagcattcaagagacccgggtgtggtcaactaggctccttacagcccagcctgagaaatatgcagtgacacctccaccacaatccagccagctcggattcaagagaagggcacccctgggaaggtgaccactggccagtgtgtttcatcaggctggtgtctttgaagaccaaataccacaccacagccatttgaatttgtgtcattacttggtactcttattttttccctgctgctctttttgcattgaagtccttttgggatgacatcaataaaactatttcatgtttttaagattgtatttgtcaagtatttctttttcaacctttctacatgcagcctttttgttgtttttattcttcaggtgggtatttcataagcagtgtgtattttttcagcccatgatttatagaactagaatcctcagtctattgtcttaaatgtatttctgtatagttttctatagaaggtgatttcctgggttttgagttatgtttcttgcttggttttgtacattaatttttctcacattttggtttcttcttccctcatgcatgaccttatttttgttgactatttttctcatttcattattttgcctttcagaagtccgcaattcattttcattttttgatggttaactgtaacattttattatataattatattaagaaaatctgagattagtcttatctttaccattctcctgaagcctatgtgaactttagaacaattaacacctatggttccccttcatgatttccaatattttggatagtcagaatgttagatctaccataactagaagtattgttttattttaccaatacttaattacaattacctacctatgtgttaaccatcatctttaatcgtcattgtttttgcacaaaactttagtataccaactcagagcagaaagaggatccatcatattctgtgtctgccctattaagcatgcttctctgctgcatggcctttgattcctagtagtagatttatcccaggcaaagatgtagagccctattatgggctatcagatctcaacaccaaggatttcttgtgccacagccctttggtgccaggcctctgactctaacttctatctctttttccaacagttctcatggatactgaagtcccccagacaccaagaaaactggtcacattgactaattttaagagatggccttgaagtagtctcagaaaatgaaaagtcatagcacatactagctattgacaatgtatggttttggctatggcaaacccataacacaaatggaagtgtcagggaagaaaaaccaccatgagcattaaggaacaaaagaatatattataggaatgaggcctgacacaatttggggagaagatggataagtgaaagtttgaaaagggtcagaaaaaacaactctaaccagctctggtgaaggtggatgaactggacttcgcattaagttttgcattaagctgttatatccatacactatatggaaccctgaaggggctggtgtaggaatctatgaagatggctgactctatgtgccaatagccctgtgagttctcagaaaatttggtggtggcactgcagtccctcctggtcagcagggctggcagtcggtataaagagctggatgtgaagcaggggaaagtcagcataaattggaactcaccggcacttttgatgctactccttactgcctggagccagtgatgacttcagaactcagtagcagctgttttactttccccttacaaacttcctgcatttcttaccccatgatcaactctaacccggaaccatactaggaaaaaagttgtccgaaacatattccttgcttagctaagttgacacagtgataaaaccccacaagaatatccagatgctccttgacttgcagtggggtaatatcctgataaatccagcacaaattgaaaacatcataattcaacttacaatatccagcttatctgtacataaccccatcataagtcaaggagcacactgaaatgcatattgcttttgcaccattgtaaagttgaaaagtcattgaaccatcatgagaccatctgtacctgacaattagtgtttctcaaaataaataggaagattttcttctgatctgaaggtcttccagccactccctcccagacatatcataatattggaccagaggtcacccatagcaagctgtccctacttattctttgcagaaaaagtacagttacagtatgaagtggcctcattttaatgaggcccaacatacccaggaaataaaaaatgcagccacaggagcatacagatgccctttaatagatatgtcaatattaacataatgcaatagctatatttgttataaaacgatttcactattgcacaaacataatatgatgggcgaagtcttaatcttatcttttctagctacctatgccagagaagcagaactaaatattaaatgaaaggcacaattgagaggctgttataaaaatgaaaacatagggctttcaaaaaaactttccagctccttgtaattgctacatatttccaacatcgatccattaaaacaagtatcccagcctgttcaaatcaaagaatttcttatgcctcctagaaactattttcactgtccagtacttagtatgacctccattacaatagaataaatttaattattctcacaacctcaacagtgattaacacggaaacatacaagctaaattgagaaatattattagaatgtttagaattaagtccctttatatatgagggaaattgtcatgagatacacatgaggtaactatctcatttagaaaatgatgaagtggcttcaacatgattatgaagaaacattggacttccagccgaggcactggcctgtgctttatcaatatttatggtagtgccaacctgtgggtctagtgattaacaaccatgagttgtcttggtgttattactttgaggatatgaaacagaagcagcaaacagactccaatgccattcattacctaaacctacactcctttccttataggaaactcacttaagtcattacaatgctttatgtctcagtgtatctttaataaatttggaagttgaattgggaagtctttaggccactttaggcaatgtatgggttttttgttttcttttgatatggggtctcactctgtcacccaggctggagtgcagtggcatgatttcagctcattgcaacctctgcctcctgggttcaagcaattctctccctcagcctcctgagtagctgggattacaggtgtccaccaccacgcctggctaatttttgtgtttttagtagagatgggttttcaccatgttggccagattggtcttgaactcctaaccttgtgatccacccgcctcggactcccaaagttctggaattacaggcgtgagccacctcacccgacctgtatggttttttgacaggcagagatggacgtaacatcagtcatgggcaaagattaccaccagggggcagactagggcatccttgggattctgtgatcagtcatccctcctcgctggtgaatggaggcagtggtcacaactctccccagagaaggtggtgtgaggccatcacggaagatgctgctgcttctgctgcttctggggccaggtataagcctccttctacctgggagcttgggtgggcatgtgcgtgtgttggcatggtcaagtggtggccagcagggttgcaatgtggattgtttatgctcatcgaagggagagggagaggccctgctctctagaggtgtaaatggtaaggtgaaagccgccggtcagaggagatgggggattatggccctagggagatgacgggaagattgcacaaaacaaacaggactctccaggagctgggagcacagggagggagtgaggctcagctctgcctggcgtcctgtctgactcggctcccactgggctctcctctctctctggcttctgtctcagcaggctccgggcttggtgctgtcgtctctcaacatccgagctgggttatctgtaagagtggaacctctgtgaagatcgagtgccgttccctggactttcaggccacaactatgttttggtatcgtcagttcccgaaacagagtctcatgctgatggcaacttccaatgagggctccaaggccacatacgagcaaggcgtcgagaaggacaagtttctcatcaaccatgcaagcctgaccttgtccactctgacagtgaccagtgcccatcctgaagacagcagcttctacatctgcagtgctagagacacagcgccaggaggggatcagacaccgcggcaagaacccctgcagctgccctccgccccagcgggccccctgagtgctgagaggggaagcgtggagaatggaaaaccacagctttcctgactgagacatctgggagtgtgtgtgcagggggtggggcgggggggagggggagaaaaagaaaagaagcactgtgagtgtggagtatggaggaggtgtagtgtttgagacccacgaaatggcaatagagttgggcctaaagtggtcggcggacatggaaagttccctgaaaattataaaacctggaattttgccctgactctgccacattagtcatgtattcttgaatagatctacacataatcctagaggtagatatgaagacagttgtataatcactgtgtatttcctataataaacttcagcgattggctttcttgtcatcatgctgggctctcaagacaaagataaccaagaggcagccaagtagagagttatgcatgaatacgttaccttaggggaggatagcaacagcattgaatagcattcactccaaatttgtgttctgtcctccttagaccaggccaccaaaataaaatcctatcacatttcctgtaaatgttgaacgccatcatgttctccatggtgtttcggttgatgaatgaacagagtaagactcggtacaaagggaggggagcaccctctatgcctaggtacacaccatacggaatgtatcgctagggaaggtgctggtgagctggctcctgggaaaggtgtcaaggggaagagggggcagaggtacctagaaggaagacctcagacaacatggcttgtctacagagttggaaagttctgccagtagttagaagacagtaagtggaacagtgaaaatcctttcctaggagaaaccaaacatttacattgaccacaaatctgtatgaaccaacagaaaatgagcaaaacatatgaccatacatttaatagaataaacatatatgactaataaacatatagagatatttcacttcattgatgatcaggataatatgaagcaagacacaatgatacatagttttatatccacttgattagcaaaatataaaaagtttagaaatataaaatgttagcgagggtatggattcataggattacttataaattactgatgggagcataagtactatcaaccatttggaaacagttcagcattatctcgtagttgaagattcctatatcccataactcagcaattccactcctaggtttacatcaggagaagctcttgcatacacatatcagaagacataaataaaaaagtgttcttcacagcaccaaacagtagaaaaacatggcaccaagccacatatgcactgagaagagtgaatgaataaactgtgacatattcatatgagtcaaaatgaatgaactacagtgaagagcaaggttataggtgaatcttagcaatataatagcaaatgtaaaaactaagtctaatgagattatgcaaagcataatgtgcttttcataaagctaaaaacaagtcaagaaaataattttcaggactgaaatatattagaacaaattatattgaaaggaaagcaaagatgagttgtatgctggagcctactttatcagctcatgggagctgactgtatacatttttcccaactccagttttagtgacatcattttgttagcttgaaattggccatagtgagggtatttacactacagaaattagcaaacacagcaaattacggtttgctttattttcctccagacttagctgtcaaccctttaccctttaccaacacactactggcagggaataataatgacccaagttcaggatttttataaggctggggcatggcaggaaatagaatgagagagaactatatggctatacattgaaatattgtcaaggtctatcttgcataatgttgaggaggagaagttttacaagttcctattatgttttttaaaaatattcattgacaagcaatgcctgtgtgttatgaaccacaggttaagataaataaaattgaatgcatatagcatcaaaaagaagagaaaacaaataaatgaatagattagagttcttacaagaaaaggatcaagggcattttatagtcaaaaccaggagtgaaatagcagtggcttaactgctaccatcctcatatagatatcggctgctgaattaatcacagcggacaacctaccacccaacagacctggacccttgtcaaccctttgcaacacagaacaggggtttagacaataagggtgaacgtgaaagcgtggagatgacacctggcccctgaccaaggtggaactgactggaacaagatgggagccaattctgcagtgaacacgctgctgcttttcgtctccgctatgaccgtgtgttgctggtggttaaataccccacctgggttcagtcacctcagactgtgccattgccactgatctcaggacccactttagttgtagccttttactctgttagcgttttcagcctggagaacagagctagtaaaatacttataaaatattccactgcttcactaacggcatggaaaagacaagagcttttaaggctctggcatgaaacagggagacagtggttacattcctatttcacgcagtcactatttccgtctacgttaagctgaggagtgtagtgtttcggtgacatttagcatggaacgctgctgggttcagacctgacattcccaaaccagctgactgtcaaggacacagcctactgcctacctatattaccttaggaaacgagacaacagcattgaacagcattcagtccatatttgtgttctgtcttccttggacaagtaccaacaaaataaaatcctatcacatttcctgtaaattttgaatgacataaatttttgatgagcaattctttttgaagtgttgaactttctgttctgattttatattctactctctgtgctttgttgtatttaaaatcaagttcacctttcagaggcagtgatgggtgaggtaagagacagactcttacatcctcctccccaacacacacacacacacatacacacacacacacacacacacacacggaggcactgtttttcccagtaatggagaagccatgggaagaatttcagaggtttcaagggagctagggtcgtctaattcctctatatccttggatatccccattcttaatgtcaaaaataatctctcgaactggtttcccagagtctcaacccatttgctatagtacatgcaccatctcaggtgtccaaagatgaatatttgataagctacttctcaacttcatacctctgctgctgtttttccattctggaatgtggaaagcagtgtgactcctattaactgaccagtagtcaattttaactacccataaatatgtgagtgtcttttatctgtaatctcctatctggtgccatttttgaaaaccagttaagactcttttatcctaaaaaatgaactatgtctaatttcttgaaagtaattattgatgaaatactccctggagagtctgaagcccctgatattgcatatttaattgttatcctccttttaataaaaggtataggaagaaattttaaatattattcctaaataccttacatcaagatgagctagagttaattaagtgggacgagggataatgaattcaagggcatttaagaaagattaaagaaccagtgcaaaatgttttaatcaggaaagaaattagtgtgtttaatgacaggaaagaagtcagcagagtgacaggagcagggggaggaggtggttgagtacagggcaaaattgaagaaggcaggaaggcaccagaccactcagaaccttactggtcaaggtaaatgatacagaatccaacataaagcttaataggagacactgaggttttcaacatttgacttctttagtaatcagattcgtggctgtgtgtgtatctgtgtatttaatcaccctggtcacaaagtgaagaaataatggaccatgcagggaaggcaaaatgttacctctaccctcttgcagtttttcggctggtcctgagaatggaagattaacaggaaggaaagcatacacatgtatttaatacaagttttacatcacatgaaagcccccataattaaaggaagaactgaatgtgcagttagagttgaacattcatatattgaattgggcaaagggtcatacattgtggaaaggtgaaaaagtaaaggggcttaggctagggttgctggttgaatggcaaagtgactaggaaggtgaggattagtttaacaagctttttttgttacagattccttggcctcaacatcatcccattctatcttggatgttaagaatattcttttttcctggtatagataagacatcttttatatgggaagcttattccatttttcaagaagaaaaggggaagggtcagagtactcctcttatacttgctattgtgtttaatgcctctagctcaaaatattccttatgccaaagtggcatattttgggcagagggttgggaggcttatgctgccaccctccagcagtgtgaacagagttgatgcggaggaaaaacttagctcaggcaagcagtagtttagctcagataatgatgatggtgttagaaatatggggaaaatgagacatttaaaaggaagtaaatcaaaggacttggcaattgattagacatgagcagcaatatgcagggggtggtgggtggtgattaagagagactgctacacacagacaaataagaaggaccaagtgggaagaagatcaagatttactttgagattgggagtgccttagggacagtaatctaaccaggaatatgcagagagcagttggatgtacaagtcatggactcagaaaatggatctggataagaagcacacctttgggacatttagcatcactggaagaatgaaagtgcctccaatcccttgatatacagtttacaatgaaaagatcagagagcataggatagcggtttagggagcacacctgccttgggggactataaaaggttgagggaggcaaaatgcactgataaaccaccatcggcattagactaatggctgaataattgtgtaagtaattgctagtaacaatgctgtggagtatgtggcaggtagcacatcaagtgctgcttttttcttaatttcgctctgatacctggaatgcctttttgctgcctcgctgccgggcgggccactcccgactcaggcaggccgaggcagagctccgcgggcattggatgaattcgctcctttgaccactagagggtgatgtggatctttctataaaatatctgccgctcatcaagtggggactcacagcttcaccggatatttcagatgagatgtttaggtactgactgaccaaaaaaattgcagatatcctgggaggccaattggtctttaaaatggcaggatctaatcttaacattttgtaataacccttagcgtttacccatatctggcacctgtagttgtgtgatttctacacagttgataaatatataaatgaataataccgtgatttctattcaacattgtgctgaatttgcaaccagtgaaacaaggggaaaaagttgaaaatgagaaaggaaagaaaaataagtattggcgcacgacaagtttatttatagagattcaaaagggtctaaagaagcaatgcattatcaataacaaaatgtagtaagtttactgaatttaacataaatataaaacattattttattttcacatactacaagcagttatgttttttaacgagagacaatttacaaataatgatataaaatagaaaataaacacctaagaacaaatctattagattagcaagactatcatgcagaaaactattaaaattttaggggaatcagggccgcgctcagtggctcacgcttgtaatctcagcactttgggaggccgaggcgggcagatcatgaggtcaggagttcaagaccagcctggccaatagggtgaaacccatctctactaaacgtacaaaaaaattagccaggcatggtggtgcacgcctgtagtcccagctagtccggaagctgaggcaggagaatggcttgaacccagaaggcggagcttgcagtgaaccgagatcatgccactgcactccagcctgggcgacagagctagcctctgtctctaaataaatacatttaagggaattattttaaaagtttgaaataagccaggcgcggtggctcacacctgtaatcccagcactttgggaggccgaggtggctggatcacctgaggtcaggagttcaagaccagcctggccaacatggtgaaaccctgtctctgctaaaaacacaaaaaattagctggacatggtggtgggtgcctgtaatcccagctactcggaagcctaaggcaggagaattgctggaacccgggaggcggaggttgcagtgagctgagattgcaccattgcactccaggcggctgggcgacagaaagaaactccgtctcaaaaaaaaaaagtttgaaataagtaaagatatacaacatgatcatgaaaaagtgaatccaatagtaaggttgtttcaatttctgcagtattatctatatattcaataccacagtaatcaaactacaaaagatttactttatgaaatttgtcaaataatctacaactaagtgaaaaagaacaaaaataagcaatatttaagaagtacaaaaagtgatgtgaattgctctaccaattatcaaattatgttatcatttaggataatgaaagaagcgtgattaaataggcaaatggaaaacagaaaatgaaaaataggcccatgaatatacaggaatttcatatataatagaggtgttattgaagatatacggaggaatgatgtaatatacaagttattctggaacaggtggttatccatacaaggaaagatgaatttaaaccttacttcacaatatatgtcaaaataaatcacaagtgaattaaatgcttaaatgcaaaattcaaaatgttaggagttttggtaaataataaggattatatcttcatgaacttgggctatggaagattttttttaacaaagaattaaaaaacatgtttaccccaaataaaagaataatgcattctactaaagaaacccaacaaaaagtagcacaaacagaataaagacatacaccacaaattggaaagatattagcaacacacatagctgacaaaggttgggtatccagagtctagaaaaaactgttacaaataaataatagctaatcaaccaaaaagaaatatggacaaagggcagtttacaggcaacactggtggcctataatatatcaaatatattcaacctccttagcaaccagaaagaagcaaacaaaaactatattgcaccatgagataatattaacatactagactggcaaaattaaacgtatattaaatagcaagtgtagtcctagatgtggaacatctgaacacactcatgagctgttggtgggatcacttatttggcttaatcactttggaaagcattttgttatgttatgtaaagttgacatgttgacttgaaaactcagtctttacattgccaggtatggcaacaatcttgcacctagaaaagcagagacatgttcgagaatacaatactgtttgtagcagcacaaacacccagggaaaaattagtgtgcattaattcaagaatgaataaattctagccaatgaatataatgtaatactagatggcagtgaaagtaaattgtctagattgtgtgtcaacgtattatcacagacctaatgttgaatgaaaaaataacattgtagaaaatatataaactagctgattcctcttagatacatttcaaagacacacaaaattaaatactacataatttacagattcttgtgtaaatgctaaagactataatgccaagctagtgaatgacaaatttaaacttcagattacacctacctgggcatgacggagaaacaatgaggaaatctaaaagagtaacatggactgagaaattttcagcaataatctaactcttaagctgattggttcaggcaaaggtattcattttattgcttctatatatgcattgcatatttgtcataaatattgttctgtatagttcaacatttcattatttaatgtagccgggcacagtggctcatgcctgtaatcccaacagtttgggaggctgaggtgggcagatcacttgaggtcaggaattaaagaccagccagtgacatggtgaaagcctgtctctactaaaaatacaaaaattagccaggtgcggtggtgggggcctgtaatcccagctactcaggaggctgaggcaggagactgcttgaacccgggagacaaaggctgcagtgggctgagatcatgccactgcactccagcctgggagacagagcaagatccgtctcaaaaataaataaataaataaataaataaataaataaatacttacttaatgtaaagcagctgctatgtgattttataagtgtgtcaaaagctactatttgtaaagaccgagttgtatgattccttacctgagatggaagggaggggaagaagcaaactgacaagttaaaaaagtaaatagagtgtaaattagttcaaccattgtggaagacagtgtggagatttctcaaggatctagaaccagaaataccatttgacccagcaatcccattactgggtatatacccaaaggattataaatcattctactataaagagacatgcacatacatgtttattgcaccactgttcacaatagcaaagacttggaaccaaccaaaatgcccatcaatgatagactggataaagaaaatgtgacacatatattccgtggaatattatgcagccataaaaaaggatgagttcatgtcctttgcagggacatagatgaagttggaaaccatcattctcagcaatctatcacaagaacagaaaaccaaacaccgcatgttctccctcataagtgggagctgaacaatgagaacacatggacacagggaggggaacatcacacatggggcctgtcgggggatggagggctaggggagggatagcattaggagaaatacctaatgtagatgatgggttgataggtgcagcaaaccaccatggcatgtgtatacttatgtaacaaaagtgcacattctgcacatgtaccccagaacttaaagtataataattttttaagtaaataaatgtatgagtgattttacttaaaaaaaatagcaaaacagtgagtaacagaaaaaaaaaaaactaaaagcaggctgaaacttacactatttttaacagctaaaacaaagtctgccctcctacattctttgaaattgaaatgactctgtcccatgtacagagcatctacaaaggctatggaaagtgatcacgtcacaaggaggttgctgacgggggctaggagagtgggtgaagaagccttacagaaaaagctaccactacgatttctttctgagccaaccatgtgcctcagacttctctgctgtgtggccatttctttctggggagccaggtaaggccctgttctgaactggttgaatttcagttccaagactctctccggtggctgcagtatcaagctccctcctgcgctttttctacagctgctctctccttcctccacaggctccacggacaccaaggtcacccagagacctagacttctggtcaaagcaagtgaacagaaagcaaagatggattgtgttcctataaaagcacatagttatgtttactggtatcgtaagaagctggaagaagagctcaagtttttggtttactttcagaatgaagaacttattcagaaagcagaaataatcaatgagcgatttttagcccaatgctccaaaaactcatcctgtaccttggagatccagtccacggagtcaggggacacagcactgtatttctgtgccagcagcaaagccacagtgccgaatgttagcccttcttagaacacaaactcattatggacccagctcaggaaataagtgtgtagcaggttggtaggcactacgtaacagaaacccaacttgaaagacaataaatcagaaggaaaaacttgtaaataacagctctaagtgagcaaaaaacaaaggggggttatttaaaacaactgatggggacaaaaccccagggaaggggccagaaggcataaaaagcttggattcctcagtgttcagcatattaggtaagatatgctaggttaccctctctctctctctacatgagctttatggatttctaacaatctttatttaaagaaggggattctgtgcttttcacttggtaaagttgtgggtgcacaaataagaatgacaagcggatcaactgtgtctttcaggtagaccctgatcttctgacccagcacatttccttgaactagagacagactctaaagggctttttgactgcttctcacagctctccctgccatagaagcctagtgggaaccattagcaattcctgccctatggaatgttacaatcacaaatttttatttttatttatttatttatatttattttaatttttttttgagacggagtctcgctctgtcatccaggctggagtgcagtggcgtgatctcggctcactacaagttccgcctcctgggttcacgccattctcctgcctcagcctcccgagtagctgggactacaggcgcccgcaccacgcccagctaattttttgtatttcttttagtggagacggtgtttcaccgtgttagccaggatggtctcgatctcctgacctcgtaatccgcctgcctcggcctcccagagtgctgggattacaggcatgagccaccacgcctggccaacaattacgaacatttttaaagcaactctattgagacataagatatatatggaatatgtatgcaataaacaaatccaactgctgcaataaaacacacccgcattttaagtgtacacttcaacaaattttaacacatttttatacccatgatgtaaccatgatgacaatcaagatacaaaacattttcatcgtctcagaaagtccctcacatctctttattgaggtcttgttaatttctctcagcatcgctttgtattttttattatacagatcttatatatattttcctaaattttattttaacaagattataaatgtactcaataaaaatattttctgccaagatttcacgtcagcctaattcaatttcgtctttacatttttcaattgacatctctacctcagtatgttacataaaaataccttctccagaaattgcatatggtttggagcaaccatatgtgagctcacagcgtcagcctcattcaccatgtgaaccaatcaagtgttagtgctgctctgtttccaggtaaaatatacttatttacatgtattggaaaagctgtgaaatttctgcaaggtgtactttaagaagagatacattttgttaatgaaaacatacctatgcgttaagattaattaaagggaatattttgcagttaagcacatgatttggaatgaggggttgcagccctgctggtcaagcctctgaattccattcttgtttctcccataggccaccttcatcaggtctatagttctacaacacagagtgtcagtagtagggaacgttgttcatgtgagtgcagggaatacttgggattctgtagtttctgctcaactttgctgtggacttaaaattgctccaaaaatacaattcactaatttaaaaatggatccaagtattcagatggagaattaccatattggaggcacgaaatgggaacatactgttgaatctgttgcaatataggaagagtgtttaatgacataaactttttcattatttactcctttatctaggaaataggacactatttaacactgactacaatgaggatcttaaatacagtagaactgtctaaattccatcaataagaatagtgcatatattaccaatattgggatctgaggtgtctcagaattagtaacacatagtactgtagagattattttaaaacatagtgtggagataattttgtgattccattttaggaatactatttctgattacatggtttcttagcataaagccttactccttcatgcaagagagtatatactatcatactatgtccctgtagttttctattccaataatgctcctcaggaataaaatatacatgataatcatgatgatgatatggataatgatgaatataattgataatgcagacagtatgtagaaagatagatgatagaatttgtaccatgtttccaggactagaacacaatcatggtaagtataatataatacctgttataattgaagtctgtaaacagtctaaagaagtagtttaaattgtttcccttgacaccttgacaaatctgcaaactacacatataggctaagtacttccgaggctatatgaacgttctaaaaaacatttcctgtctgtggattccagcataatgcatattctcttctaaggcagaagtttttaacctgggatccgtggacctccaaggagtgcagagataaaattcagggaatcaataaatttgaatgggaaaatagatctttattttaactaacctccaactgaaatatacctttccttctatgatataatgagtaaaccatagtagttttagtaatatcagtgacaaagtcaatgacagaaatcacagacatttgcttatatgttgcatagatgacagttgatataaaagtcagatattttcataccatgttaaatgcagtaaatatactttcatcactatgttgaaatcatgacagttttcagattcagcaggttatatttcatataatgaaatttaaaggtgttcctatattaatatatgagaatttaaaaaaattgatatctgcatttcaaaataattttctatattctagtttatgcatttaaaatgttattctgagatggggtccttaggatttaccagtctgacaaagaggtccctggtacaatgtgaagaactcctggacacagaattagatcctcaacgcaggcatgattgacaacctgaagcctagacctacgcattggaaacaactatgttgcaagcattctttctcagagtttcacccacactgccgcacctcttaatgcttctcactctaaataattactttatattctctttctgtctctctcctgctctttgttttctctctctctctctctctctgccttgtttttcttctaggagggaacagcaacagcttctaaaccccaccagcttgcaaccaaaagtttcatcatgaaagcatcttttaattgcagataacctcagaaatagaacaacatttgtctaccaaaacaaaagcattcattaagaaatcagctaggatcctatttttatttactaaaactacttggaagaacccatgttatacaatgaatttacactcatacaaatttctactcagttggaaaatgagactttagtcagctggtacaaccctatgaccataaatgtctcatttcacttgatacagtattgacttcctaacttcctgtgaattagaacttcaggtccagaaagtaataagagcaaacgcaaatctagtgtttcttatgtactaagaactgttctaaatgctttatttatgtaatgttcatcacaggttttgggtagttacttattatctcaattttacagataaagtgaaattgaagagatgctctgtaacttttccaaggttacatagctgcgaaatggcagagacaggactaaagcccatgccgtgtcccaagtccctgctctaatccattgtcacaagggaaggggcgcttcagacactttgctattcctaaaattgcaggagtagcccccaccccatctctactgtattaattatttatagtgaatacagagggtgtagagaatcggttctttaaaaaacaaaaacaaaaacaaaaccactaaacttccaaaccccttcttgtgttgagttgagcacaggtgcatggcactctgtgtatgactctgaccaggaagtgagggattggctcttctgaccatgcaggcaggcacttgtccatttagaagggatataaaaagcttctataagcagaagaggaggtgcatgtgacttgatcgctctaattcttagtctcaccatctgcaaaatcagctgtgaaaatcagtcatcacgtagcaatgacaaattctttatattaagccccggggaggggctagatctcagccccttcccttggcctctctctctctcttagagcctgtgtctgtaacttcagagagattttgtcgctgccatggggagctgggtcctctgctatgtgaccctgtgtctcctgggagcaggtgagctcagcacacatccaggtggtcaattcctattctgggcttgccaggcccttccctggccagcacctcccttccaggcatgatctccagcctttgtctcttggacccttggatgctgacatctatcagatgccattccagctcactggggctggatgggatgtgactctggagtggaaacggaatttgagacacaatgacatgtactgctactggtactggcaggacccaaagcaaaatctgagactgatctattactcaagggttgaaaaggatattcagagaggagatctaactgaaggctacgtgtctgccaagaggagaaggggctatttcttctcagggtgaagttggcccacaccagccaaacagctttgtacttctgtcctgggagcgcaccacaatggaagcacaaccattgtctctctgtgcggaaatgtgtcctcaccctacagcccccaccacatcctctagcttaattttttcatttttaatattttcttgagattttactatgtcctgttacttttgcaaacacaaaagatacaaaactgaaaagaaaatagatcctttatccaaggagctaagagtctagcaataaagtagttataacagaatggaaaatataatgtataatactaaaatcagaagtcatttgggagctttagggaggacatgcccaattctgtctgattgaatcagagaaaacaaagaggaagtcacattagaacttcaccagctagacctggttctgagtagggcattctgggcaaagagaacagcttttgcaaaggcatattaaagagtttgtcactttggggaacagtttacaaagagaaagaagatgatcaatttatatgaatcaaaagaaatggaatacatttgaggaagtagacagaaaggagtttttgaaaaagttgagtttttggttccatgaatacaataagtatgaaagtcctttgtaggctgttgctcaaaagagagagctgaagcttcattgtcatcagcagacaagcaaacaatacaatttttcaatatatatatatattttcctcatgtaactttgaaatgatactatttttccattttcctcatataactttgatccttaacaaagggcacagtttcaaacaatatgaaatcatgttagcagtagcagttcccatttgggataatagggttcaactgtctatggaacaatgagataaaaactagaagcaggcaactgcatagacaagatgtgaaattgagatgccataaggctggactagaggttgagattctgcagatttcagcatgtaaataattgaactatggggacagaaaattccaaccaaatatagatttagatcacagagataaaaggcatggaagttaagactgtggtattctggttccttatggagattaaagaagcctaagagtgaggagtgattagaacatgggatgtaaaaacaaaagagggaaagagagagagtgagagttttgttttgtctagtatttgatatttctaagaaaattcgggaaaaaaataaaggtaacccaggcagaagaagccgcaaacacttcttgggtaacagggaatagttggtaaaatgtcatatgttagtttactgaggtgcacagaaccttttccactgaggttccttttggaaagacacaagacttagctaagattccaagaaatcaccaaagtaggaaatgaaaagcctccatgaatgaagttgcatgagtctcctaccagtggataaaggataggataggataaaagaatagctgcaaaggataaaagaatagctgaggcactgaagtagaagctccaagtgagaggactaaatctaacaaacatgaagaattattataaaaccacaacaataaaagtggtgtaatataagggcattgatatataaataggtccaaggaaaaaaatacatgttcataaacacagagcaatggtactgcaacaatcaaagaatataattttcaataaatggtgataggaaaattgggtatctatataaagaaaaataagtgcaattggacacatctcaatatatagccaaaatcaatcccagctatattaaaagcataattgtaataaaatcacaaggcttctagaatactgtataagagcacatcttcatggccttaaagcagggaaagagttcttattccctcaatcatagggaacagattgataaaaatggctatatcaaaattaacatattgaatttatcaatgttaattatgtaacagtgacaagattgactgtatagtgacatatcattaaatatctatatatttataccaaattaatatccctatttatatttatattttcaagaaaagctagtatataaattttttaaaaacctacaaactaatttttctacagatcaatgagaaaaaggtaactgtcaatggaaaaagtgagtgaaaaccataagcacctagcaaaatctcactggtcattaaacatgtaaatgtggctatatttaataatcagggaaatagaaattgagtccaacgaaatatatacccacaagaatggctacgatgataaaaatagtaactatcaagtgttggcaaggcaaagtgtcaacaagaactctctgaatcactggctagagtgtatatcggtagatccagtttggaaaacaatttggtattatctagtaaagttcaagatgtgtgtacccactatccatcaattccacccttgagaaaggcttttctagagaaacccttctacgaaaatcaggacaagaatattcactgtaatacatctgtcatggcaaaaacgtataaaatatccaaatgtaacttaagagaagaataaatcctggttattaaaaagaaattacacagcagtgaaaattcatgaactaaaactaaacacacaaacatgaatgaatttcacaaatttgaatgaaaaattacattgcagaagaaaggtacagtattgtctcgtttgtgtaaagtttgaaagcatctaaaactaaacactattttgtttgcttatgtgcctatgcattaaaatataaaagagaagcaaataattacaaaaacaaacacctcaatagagttagagaacagaggcatggaatctgggaaaagaaataagagctttcaaatattctggtaatcttttatttcctgtgccaagttgtttttttaagtgatcattctgttggtattttatcaagttattatctatatattcaaagtccattttgtaatgtggagaaaacaacctcactgaacaattaaattagtaaggagaaatctatggaaagatatacattaagctgttaacattacttacctgaaatgaggatgagatggaggaagagaaaagtaagcgaaaaaaaaaatcatcaaaaaatgcacaatttaaaataaatagttacagagagaaaaagcaaaaaagggaggttatgtaaaagaagcactagtaaatgaacaagctaaaatacaccagaaagagctagaaggtgaagtatttttcaaagcagtcactagtttcagaatcataaagatagcaattacaacagagatctgaaatatataaaagataattagataactaatagccagaaggaatgtccagtcttgagttagaaactgatgctcaaattaatggcaaaggacgtttttgaaacaactgtgaaactttgcataaaaactaaatagtagataagatgaaaatgcatcgatgagaaaggatgatcattaactgaaaaaaagcttatcaaacagaatttcaagaatattgtttactaaaaaaagtgtctatatatctacacatttatatatggggcagagaaggatctagaaagactcactaaggtgttaacagtgataattgctttctggcagtggtatcatatttttattttgttattttattttctaactttctaaaatatgagtgtattgcttatattagcaaaaatagacataacatatttttaaatgaatacaaaataactgagttatatttcctgagttaggataaaagctttttttccctgatactatgaagtgtttttgctcaggaacatgaagcaataacatgatgattataagtcagtggagggatcacgtcacaagaaggtgcagaaaggggatgaaaaagcctcatccctttgcaacgtcaatgcgatcatgggcaccaggctcctcggctgtgcagccctgtgtctcctggcagcagatgcgccctgagcacaaaagaaaaatccttgtcctgggcttgccaaccagcagatccaagctttgttttgttttgttttgttttgttttgttttgtttgttaagctctttcctggactctttctacagcatctgtttctttctcttacagactcttttcatgccaaagtcacacagactccaggacatttggtcaaaggaaaaggacagaaaacaaagatggattgtacccccgaaaaaggacatacttttgtttattggtatcaacagaatcagaataaagagtttatgcttttgatttcctttcagaatgaacaagttcttcaagaaacggagatgcacaagaagcgattctcatctcaatgccccaagaacgcaccctgcagcctggcaatcctgtcctcagaaccgggagacacggcactgtatctctgcgccagcagtcaatccacagcactgaaatgtcagttcctcttagcacacaaacttgtcacagacccagctcaggaagcaggtgatgtattaggctggaagggagtaacagaaaataactggagccagcttaagccacagtgtaatttaacacaaggataaagggtgtttagcagaagtcaagaggtgatagaagttctgaaaaggcaccactagggctgggctctagaatggctatctctccagcgctgatttttattcaattttggctgctgaatgcttttctctccctgtacaccatctctttttctccaggcctcgtggtgagaatgagatggtcactaaagattacaaattcagttgccatcatttccctacactgataaataccaggctggctctttctaagcctcaattcaaaatcccaagagaaaaaaacagatcagtcatgatccagccattaaccttctcacagagcactcagcaggaggcatgtatgtatatatttaaaatcacataaatattacttttccactcagctcaagcaagggaagtgctccgtttttctgtatgtacatttggtcttgttgcttctacatgatagagagtactcatacccatttcttcagaaatacatagccagattttctccagttttctgccagaattgaaaattcttgtacaaataccttcatagacttgtatgattgctttataggattatatacccagagcaagtcatgattgctgagacatggaattctatgcatattttatctatctaaataccaccacgggttcttcaggatcactgtatacatctgcaatcccacataaaagtgaatagggtgttttcctacatcctaatatctcctttaatccttatccagtgatctagattgttctcagtctagcaatgtaaagagattccaatctctgtctctctttctctccaccccccacccctgcaaccctctcacctactgccagaatatcatcagtgtttaccataaagatacaggtgacaattttttaaaactaaataaaaccaataatttaaaggaactgagagattacgttatactactataataataactggcagcaatctagaaggctgaataatgttctctccctccttttctttcctttgcaattttctaattactaatgagtttgagcacttcttcatgtgatagtggtcctggatttctgttctcaaaatggcctatccatatccgctggcaaattctctattgacagttctatattttcctcaatgatttgtagggggtcctgagatatacaagatattagtctcctttctgaaactttaggcactggaaataccaccacccaatatggcaccacctctgtcccagacttcaaagaatcagtagatgtgggaggaaccaggtgatctcttaccttagcaggtgcatgcgtgttatctccattatgtgaatgagacttctatctttcacttccactctgctgagtgctcaacttgctgtctcttccattattactcatgtctttaagcagcatagaaaagttaccagccatggctgtccccaaactactatcacccactgacaaccctttccatccagaactgctgaaaaaatgcttcactccatttagctgtgcttttttacaatatggggcaaatttgattcaaattaattcttattgctcttttctaagtgaattatgctgcctggttatagcaaaggacagaaaaacttcacacatctttttggaagacttaatacttgcccacacattatctcttttagggccaaattccatccactgcaaacacctatctccttgagctcttgatatgacagctgatccattttgatttcacaaatgcttacagagcaactcccattcactgagacataaaggcattcagaaactttcagctacactacatggaattttggtctctggggaaagggagaagagtaaaaagaaccataaaaatgtatttcaaataatgtgtataaggatgacaaaatatagattactttcatgaaaaacattagaacattatattgtctttgggagtgatttatcagtggataaattaaaacaaattcctgaggaagtttgggaaaaaaataaatttaggaaaacaaattttaaatgatttcctgaaaaccatcagggtttaccataaagttaacaattgaaaaaaatcaaataatttaatagtgaatgagaatatgaatacagaaaattcatatgaatatggaatgaaatattagtaaaaatgtgtttgagaacacttacaaatgaattttgttgtccaatttgattaagagtctagtcaaagtgttactcttttaaactacttgtaatagtgtcagtttgacaatctggaacaaaaacctttaaaatgcttatttttgggaatttggctctaaatcaaaatagatagttgttactgtacttgttctattgccttaagccactataaaacttgacaaaaattgtaagacaactatgttcagacatcagacaacaggcagtacacgtcgccatctctgggaaagaggaaacctagaaggggaatttcgctattgtcctaagactctgccttggtatgacttctgggctgcaccacaagtatatgaagcccaagcagtgggcagtggtctacccagcatagggaggcagagattgagttcagaagtatggacatggctgatagtgatagggataagctactgcagagaaggaagctatgcagaataagacctccaaatattttatgaggtccccttaagtctttggtcaaaaactaagcagcaaatgcatgggaaacgcctccataagacctggcagagaacagttgctgggtagttgtgaga

SEQ ID NO: 12831 - DNA, 2024 bp, Rattus norvegicus
  ref <308>: DATABASE ACCESSION NUMBER: EMBL / M23995
  ref <309>: DATABASE ENTRY DATE: 2000-03-04
caatttgctgagcctgtcacctttgttccaggagccaaaccagcaatgtcttcccctgcacagcctgcagttcctgccccactggccaacttgaagattcaacacaccaagatctttataaacaatgaatggcacaactcattgaatggcaagaaatttcctgtcattaaccctgcaactgaagaggtcatctgccatgtggaagaaggggacaaggcagatgttgacaaagctgtgaaggctgcaagacaggctttccagattggctccccctggcgcaccatggatgcttcagagagaggatgcctgctgaacaagctggctgacttaatggagagagatcgcgtgctgctggctacaatggaatcaatgaatgctggaaaaatctttactcatgcataccttttggatacagaggtcagcataaaagccttaaagtactttgcaggctgggcagacaagattcatggccaaacaattccaagtgatggagatgttttcacttatacaagacgtgaacctattggggtgtgtggccaaatcattccttggaatggtccgttgattttattcatttggaagataggcgctgcccttagctgtgggaacactgtgattgtgaagccagcagagcaaactcctctcacagctctttacatggcatctttaataaaagaggcagggtttcctcctggtgtggtgaacgttgtccctggttatggatcaactgcaggggcagccatctcttctcacatggacatagacaaggtgtctttcacaggatcaacagaggttggcaaattaatcaaagaagctgcagggaaaagcaatctgaagagggtcaccctggagcttgggggaaagagcccttgcattgtgtttgcagatgctgacttggatagtgctgttgagtttgcacaccaaggagtattcttccaccagggtcagatttgtgtcgcagcatccagactttttgttgaggagtccatttacgatgaatttgttaggaggagtgtggagcgggctaagaaatacgttctaggaaatcctctggactcaggaataagtcaaggtcctcagattgacaaggagcaacatgctaaaatccttgatctcattgagagtgggaagaaagaaggcgccaaactggagtgtggtggaggacgctgggggaacaaaggcttctttgtccagcctacagtcttctccaatgtgaccgatgagatgcgcattgccaaagaggagatatttggaccagtgcaacaaatcatgaagtttaagtccatagatgaggtgatcaagagagccaacaatactccctatggtctagcagcaggagtcttcacaaaagacctggacagggccatcactgtgtcttctgctctgcaggccgggacagtgtgggtgaattgttatttgactctctctgtccagtgcccatttggtgggttcaagatgtctggaaatgggcgagaaatgggtgaacagggtgtttatgaatacactgagctcaagacagtcgcaatgaaaatatctcagaagaactcctaaagaagccagcagagtgacgagaaactctcagcagtagctacatgtctcctacaatcaccagcagagggttgttttattacagggtcttctgttgatttcttaaacataaggaatccatcagcattactgtaactcatagaaaatgtatagtttaattcttctaatacatgaccctaatacatacccaagaagaaagggatacatttaggtacatgctctttgtaacccagtcatgaaaaagtgcttttcattgtagctacttgtctacagccctcatttgatgtgatttaaactctgtttctcggtgacttcttgccactactcaccatgcacaactgaaaagtcagccactgttcttggagttattgttctgagtattgtgaaatatttttagaatgacatacctgcttgtcaaatgaaatgcttagctgtaattagagtgcaaagtttaataaaggcaaaatctcacatga

SEQ ID NO: 12832 - protein, 500 aa, Rattus norvegicus
  ref <308>: DATABASE ACCESSION NUMBER: SWISS-Prot / AAA40718
  ref <309>: DATABASE ENTRY DATE: 2002-06-15
SSPAQPAVPAPLANLKIQHTKIFINNEWHNSLNGKKFPVINPATEEVICHVEEGDKADVDKAVKAARQAFQIGSPWRTMDASERGCLLNKLADLMERDRVLLATMESMNAGKIFTHAYLLDTEVSIKALKYFAGWADKIHGQTIPSDGDVFTYTRREPIGVCGQIIPWNGPLILFIWKIGAALSCGNTVIVKPAEQTPLTALYMASLIKEAGFPPGVVNVVPGYGSTAGAAISSHMDIDKVSFTGSTEVGKLIKEAAGKSNLKRVTLELGGKSPCIVFADADLDSAVEFAHQGVFFHQGQICVAASRLFVEESIYDEFVRRSVERAKKYVLGNPLDSGISQGPQIDKEQHAKILDLIESGKKEGAKLECGGGRWGNKGFFVQPTVFSNVTDEMRIAKEEIFGPVQQIMKFKSIDEVIKRANNTPYGLAAGVFTKDLDRAITVSSALQAGTVWVNCYLTLSVQCPFGGFKMSGNGREMGEQGVYEYTELKTVAMKISQKNS

SEQ ID NO: 12833 - DNA, 700 bp, Homo sapiens
  ref <308>: DATABASE ACCESSION NUMBER: EMBL / M31994
  ref <309>: DATABASE ENTRY DATE: 2000-03-04
ttctctctaggggagagtacggtttccatgaatatacagaggtcaaaacagtcacagtgaaaatctctcagaagaactcataaagaaaatacaagagtggagagaagctcttcaatagctaagcatctccttacagtcactaatatagtagattttaaagacaaaatttttcttttcttgattttttttaaacataagctaaatcatattagtattaatactacccatagaaaacttgacatgtagcttcttctgaaagaattatttgccttctgaaatgtgacccccaagtcctatcctaaataaaaaaagacaaattcggatgtatgatctctctagctttgtcatagttatgtgattttcctttgtagctacttttgcaggataataattttatagaaaaggaacagttgcatttagcttctttcccttagtgactcttgaagtacttaacatacacgttaactgcagagtaaattgctctgttcccagtagttataaagtccttggactgttttgaaaagtttcctaggatgtcatgtctgcttgtcaaaagaaataatccctgtaatatttagctgtaaactgaatataaagcttaataaaaacaaccttgcatgattcttgttacttttgaatttttttaagtacaagttttggtcacagtgatttcttcttgtcacttaaaaacagtgttaaa

SEQ ID NO: 12834 - protein, 500 aa, Homo sapiens
  ref <308>: DATABASE ACCESSION NUMBER: SWISS-Prot / P00352
  ref <309>: DATABASE ENTRY DATE: 2002-06-15
SSSGTPDLPVLLTDLKIQYTKIFINNEWHDSVSGKKFPVFNPATEEELCQVEEGDKEDVDKAVKAARQAFQIGSPWRTMDASERGRLLYKLADLIERDRLLLATMESMNGGKLYSNAYLNDLAGCIKTLRYCAGWADKIQGRTIPIDGNFFTYTRHEPIGVCGQIIPWNFPLVMLIWKIGPALSCGNTVVVKPAEQTPLTALHVASLIKEAGFPPGVVNIVPGYGPTAGAAISSHMDIDKVAFTGSTEVGKLIKEAAGKSNLKRVTLELGGKSPCIVLADADLDNAVEFAHHGVFYHQGQCCIAASRIFVEESIYDEFVRRSVERAKKYILGNPLTPGVTQGPQIDKEQYDKILDLIESGKKEGAKLECGGGPWGNKGYFVQPTVFSNVTDEMRIAKEEIFGPVQQIMKFKSLDDVIKRANNTFYGLSAGVFTKDIDKAITISSALQAGTVWVNCYGVVSAQCPFGGFKMSGNGRELGEYGFHEYTEVKTVTVKISQKNS

SEQ ID NO: 12835 - DNA, 2024 bp, Rattus norvegicus; identical to SEQ ID NO: 12831
  ref <308>: DATABASE ACCESSION NUMBER: EMBL / M23995
  ref <309>: DATABASE ENTRY DATE: 2000-03-04

SEQ ID NO: 12836 - protein, 500 aa, Rattus norvegicus; identical to SEQ ID NO: 12832
  ref <308>: DATABASE ACCESSION NUMBER: SWISS-Prot / AAA40718
  ref <309>: DATABASE ENTRY DATE: 2002-06-15

SEQ ID NO: 12837 - DNA, 700 bp, Homo sapiens; identical to SEQ ID NO: 12833
  ref <308>: DATABASE ACCESSION NUMBER: EMBL / M31994
  ref <309>: DATABASE ENTRY DATE: 2000-03-04

SEQ ID NO: 12838 - protein, 500 aa, Homo sapiens; identical to SEQ ID NO: 12834
  ref <308>: DATABASE ACCESSION NUMBER: SWISS-Prot / P00352
  ref <309>: DATABASE ENTRY DATE: 2002-06-15

SEQ ID NO: 12839 - DNA, 1080 bp, Rattus norvegicus
  ref <308>: DATABASE ACCESSION NUMBER: EMBL / M25350
  ref <309>: DATABASE ENTRY DATE: 2000-03-04
ctcatgacccagataagtggagtgaagaaactgatgcacagctcaagcctgaacaacacaagcatctcacgctttggagtcaacacggaaaatgaggatcatctagccaaggagctggaagacctgaacaaatggggccttaacatcttcaacgtggctgggtactcccataatcggcccctcacatgcatcatgtacgccattttccaggaaagagaccttctaaagacgtttaaaatctcctccgacaccttcgtaacctacatgatgactttagaagaccattaccattctgatgtggcgtatcacaacagcctgcacgctgctgacgtggcccagtcaacgcacgttctcctctctacgccagcactggatgctgtcttcacagacctggaaatcctggctgccatttttgcagctgccatccatgatgttgatcatcctggagtctccaatcagtttctcatcaatacaaattccgaacttgctttgatgtataatgacgaatctgtgctggaaaaccatcacctcgctgtgggattcaagctccttcaagaggaacattgcgacatctttcagaatcttaccaagaagcaacgccagacactcaggaaaatggtgattgacatggtgttagcaactgatatgtccaagcacatgagcctcctggctgaccttaaaacgatggtagaaaccaaaaaggtgacgagctccggtgttctcctcctggacaactatactgaccggatacaggttcttcgcaacatggtacattgtgcagacctgagcaaccctaccaagtccttggagttgtatcggcaatggactgatcgcatcatggaggagtttttccaacagggagacaaagaacgggagaggggaatggagattagcccaatgtgtgataaacacacagcttctgtggaaaagtcccaggttggtttcattgactacattgtccatccattgtgggagacctgggcagacctggttcagcctgatgctcaagacattttggacacactagaagataacaggaactggtaccagagtatgattccccagagcccctctccacca

SEQ ID NO: 12840 - protein, 721 aa, Rattus norvegicus
  ref <308>: DATABASE ACCESSION NUMBER: SWISS-Prot / AAB96560
  ref <309>: DATABASE ENTRY DATE: 2002-06-15
MTAKNSSKELPASESEVCIKTFKEQMRLELELPKLPGNRPTSPKISPRSSPRNSPCFFRKLLVNKSIRQRRRFTVAHTCFDVENGPSPGRSPLDPQASSSSGLVLHAAFPGHSQRRESFLYRSDSDYDLSPKAMSRNSSLPSEQHGDDLIVTPFAQVLASLRIVRNNFTLLTNLHGAPNKRSPAASQAPVTRVSLQEESYQKLAMETLEELDWCLDQLETIQTYRSVSEMASNKFKRMLNRELTHLSEMSRSGNQVSEYISNTFLDKQNDVEIPSPTQKDREKKKKQQLMTQISGVKKLMHSSSLNNTSISRFGVNTENEDHLAKELEDLNKWGLNIFNVAGYSHNRPLTCIMYAIFQERDLLKTFKISSDTFVTYMMTLEDHYHSDVAYHNSLHAADVAQSTHVLLSTPALDAVFTDLEILAAIFAAAIHDVDHPGVSNQFLINTNSELALMYNDESVLENHHLAVGFKLLQEEHCDIFQNLTKKQRQTLRKMVIDMVLATDMSKHMSLLADLKTMVETKKVTSSGVLLLDNYTDRIQVLRNMVHCADLSNPTKSLELYRQWTDRIMEEFFQQGDKERERGMEISPMCDKHTASVEKSQVGFIDYIVHPLWETWADLVQPDAQDILDTLEDNRNWYQSMIPQSPSPPLDERSRDCQGLMEKFQFELTLEEEDSEGPEKEGEGPNYFSSTKTLCVIDPENRDSLEETDIDIATEDKSLIDT

SEQ ID NO: 12841 - DNA, 1080 bp, Rattus norvegicus; identical to SEQ ID NO: 12839
  ref <308>: DATABASE ACCESSION NUMBER: EMBL / M25350
  ref <309>: DATABASE ENTRY DATE: 2000-03-04

SEQ ID NO: 12842 - protein, 721 aa, Rattus norvegicus; identical to SEQ ID NO: 12840
  ref <308>: DATABASE ACCESSION NUMBER: SWISS-Prot / AAB96560
  ref <309>: DATABASE ENTRY DATE: 2002-06-15

SEQ ID NO: 12843 - DNA, 2297 bp, Rattus norvegicus; identical to SEQ ID NO: 3519
  ref <308>: DATABASE ACCESSION NUMBER: EMBL / M25804
  ref <309>: DATABASE ENTRY DATE: 2000-03-04

SEQ ID NO: 12844 - protein, 508 aa, Rattus norvegicus; identical to SEQ ID NO: 3520
  ref <308>: DATABASE ACCESSION NUMBER: SWISS-Prot / AAA74939
  ref <309>: DATABASE ENTRY DATE: 2001-10-16

SEQ ID NO: 12845 - DNA, 2768 bp, Homo sapiens; identical to SEQ ID NO: 3521
  ref <308>: DATABASE ACCESSION NUMBER: Refseq / NM_021724
  ref <309>: DATABASE ENTRY DATE: 2001-03-22

SEQ ID NO: 12846 - protein, 614 aa, Homo sapiens; identical to SEQ ID NO: 3522
  ref <308>: DATABASE ACCESSION NUMBER: Refseq / NP_068370
  ref <309>: DATABASE ENTRY DATE: 2001-03-22

SEQ ID NO: 12847 - DNA, 2297 bp, Rattus norvegicus; identical to SEQ ID NO: 3519
  ref <308>: DATABASE ACCESSION NUMBER: EMBL / M25804
  ref <309>: DATABASE ENTRY DATE: 2000-03-04

SEQ ID NO: 12848 - protein, 508 aa, Rattus norvegicus; identical to SEQ ID NO: 3520
  ref <308>: DATABASE ACCESSION NUMBER: SWISS-Prot / AAA74939
  ref <309>: DATABASE ENTRY DATE: 2001-10-16

SEQ ID NO: 12849 - DNA, 2768 bp, Homo sapiens; identical to SEQ ID NO: 3521
  ref <308>: DATABASE ACCESSION NUMBER: Refseq / NM_021724
  ref <309>: DATABASE ENTRY DATE: 2001-03-22

SEQ ID NO: 12850 - protein, 614 aa, Homo sapiens; identical to SEQ ID NO: 3522
  ref <308>: DATABASE ACCESSION NUMBER: Refseq / NP_068370
  ref <309>: DATABASE ENTRY DATE: 2001-03-22

SEQ ID NO: 12851 - DNA, 1139 bp, Rattus norvegicus
  ref <308>: DATABASE ACCESSION NUMBER: EMBL / M27293
  ref <309>: DATABASE ENTRY DATE: 2000-03-04
tttttttttttttgagaaaagggaatttcgtcccaaataaaaggaatgaagtctggctccggaggagggtccccgacctcgctgtgggggctcgtgtttctctccgccgcgctctcgctctggccgacgagtggagaaatttgtgggcccggcattgacatccgcaacgactatcagcagctgaagcgcctggaaaactgcacggtgatcgagggcttcctccacatcctgctcatctccaaggccgaggactaccgaagctaccgcttccccaagctcacagtcatcaccgagtacttgctgctgtttcgagtggccggcctcgagagcctgggagacctcttcccgaacctcacagtcatccgtggctggaaactcttctacaattacgcactggtcatcttcgagatgaccaatctcaaggatattgggctttataatctgaggaacattactcggggggccatcaggattgagaaaaacgctgacctctgttacctctccaccatagactggtctctcatcttggatgcggtgtccaataactacattgtggggaacaagcccccaaaggaatgtggggacctgtgtccagggaccttggaggagaagcccatgtgtgagaagaccaccatcaacaatgagtacaactaccgctgctggaccacaaatcgctgccagaaaatgtgcccaagtgtgtgtgggaagcgagcctgcaccgagaacaatgagtgctgccacccggagtgcctaggcagctgccacacaccggacgacaacacaacctgcgtggcctgccgacactactactacaaaggcgtgtgcgtgcctgcctgcccgcctggcacctacaggttcgagggctggcgctgtgtggaccgggatttctgcgccaacatccccaacgccgagagcagtgactcagatggcttcgtcatccacgatggcgagtgcatgcaggagtgtccatcaggcttcatccgcaacagcacccagagcatgtactgtatcccctgtgaaggcccctgccccaaggtctgcggcgatgaagaaaagaaaacgaaaaccatcgattctgtgacgtctgcccagatgctccaagggtgcaccattttgaagggcaatctgcttattaacac

SEQ ID NO: 12852 - protein, 1370 aa, Rattus norvegicus
  ref <308>: DATABASE ACCESSION NUMBER: SWISS-Prot / AAA41384
  ref <309>: DATABASE ENTRY DATE: 2002-06-15
MKSGSGGGSPTSLWGLVFLSAALSLWPTSGEICGPGIDIRNDYQQLKRLENCTVIEGFLHILLISKAEDYRSYRFPKLTVITEYLLLFRVAGLESLGDLFPNLTVIRGWKLFYNYALVIFEMTNLKDIGLYNLRNITRGAIRIEKNADLCYLSTIDWSLILDAVSNNYIVGNKPPKECGDLCPGTLEEKPMCEKTTINNEYNYRCWTTNRCQKMCPSVCGKRACTENNECCHPECLGSCHTPDDNTTCVACRHYYYKGVCVPACPPGTYRFEGWRCVDRDFCANIPNAESSDSDGFVIHDGECMQECPSGFIRNSTQSMYCIPCEGPCPKVCGDEEKKTKTIDSVTSAQMLQGCTILKGNLLINIRRGNNIASELENFMGLIEVVTGYVKIRHSHALVSLSFLKNLRLILGEEQLEGNYSFYVLDNQNLQQLWDWNHRNLTVRSGKMYFAFNPKLCVSEIYRMEEVTGTKGRQSKGDINTRNNGERASCESDVLRFTSTTTWKNRIIITWHRYRPPDYRDLISFTVYYKEAPFKNVTEYDGQDACGSNSWNMVDVDLPPNKEGEPGILLHGLKPWTQYAVYVKAVTLTMVENDHIRGAKSEILYIRTNASVPSIPLDVLSASNSSSQLIVKWNPPTLPNGNLSYYIVRWQRQPQDGYLFRHNYCSKDKIPIRKYADGTIDVEEVTENPKTEVCGGDKGPCCACPKTEAEKQAEKEEAEYRKVFENFLHNSIFVPRPERRRRDVLQVANTTMSSRSRNTTVADTYNITDPEEFETEYPFFESRVDNKERTVISNLRPFTLYRIDIHSCNHEAEKLGCSASNFVFARTMPAEGADDIPGPVTWEPRPENSIFLKWPEPENPNGLILMYEIKYGSQVEDQRECVSRQEYRKYGGAKLNRLNPGNYTARIQATSLSGNGSWTDPVFFYVPAKTTYENFMHLIIALPVAILLIVGGLVIMLYVFHRKRNNSRLGNGVLYASVNPEYFSAADVYVPDEWEVAREKITMNRELGQGSFGMVYEGVAKGVVKDEPETRVAIKTVNEAASMRERIEFLNEASVMKEFNCHHVVRLLGVVSQGQPTLVIMELMTRGDLKSYLRSLRPEVENNLVLIPPSLSKMIQMAGEIADGMAYLNANKFVHRDLAARNCMVAEDFTVKIGDFGMTRDIYETDYYRKGGKGLLPVRWMSPESLKDGVFTTHSDVWSFGVVLWEIATLAEQPYQGLSNEQVLRFVMEGGLLDKPDNCPDMLFELMRMCWQYNPKMRPSFLEIIGSIKDEMEPSFQEVSFYYSEENKPPEPEELEMELELEPENMESVPLDPSASSASLPLPERHSGHKAENGPGVLVLRASFDERQPYAHMNGGRANERALPLPQSSTC

SEQ ID NO: 12853 - DNA, 4989 bp, Homo sapiens
  ref <308>: DATABASE ACCESSION NUMBER: Refseq / NM_000875
  ref <309>: DATABASE ENTRY DATE: 2002-11-05
ttttttttttttttgagaaagggaatttcatcccaaataaaaggaatgaagtctggctccggaggagggtccccgacctcgctgtgggggctcctgtttctctccgccgcgctctcgctctggccgacgagtggagaaatctgcgggccaggcatcgacatccgcaacgactatcagcagctgaagcgcctggagaactgcacggtgatcgagggctacctccacatcctgctcatctccaaggccgaggactaccgcagctaccgcttccccaagctcacggtcattaccgagtacttgctgctgttccgagtggctggcctcgagagcctcggagacctcttccccaacctcacggtcatccgcggctggaaactcttctacaactacgccctggtcatcttcgagatgaccaatctcaaggatattgggctttacaacctgaggaacattactcggggggccatcaggattgagaaaaatgctgacctctgttacctctccactgtggactggtccctgatcctggatgcggtgtccaataactacattgtggggaataagcccccaaaggaatgtggggacctgtgtccagggaccatggaggagaagccgatgtgtgagaagaccaccatcaacaatgagtacaactaccgctgctggaccacaaaccgctgccagaaaatgtgcccaagcacgtgtgggaagcgggcgtgcaccgagaacaatgagtgctgccaccccgagtgcctgggcagctgcagcgcgcctgacaacgacacggcctgtgtagcttgccgccactactactatgccggtgtctgtgtgcctgcctgcccgcccaacacctacaggtttgagggctggcgctgtgtggaccgtgacttctgcgccaacatcctcagcgccgagagcagcgactccgaggggtttgtgatccacgacggcgagtgcatgcaggagtgcccctcgggcttcatccgcaacggcagccagagcatgtactgcatcccttgtgaaggtccttgcccgaaggtctgtgaggaagaaaagaaaacaaagaccattgattctgttacttctgctcagatgctccaaggatgcaccatcttcaagggcaatttgctcattaacatccgacgggggaataacattgcttcagagctggagaacttcatggggctcatcgaggtggtgacgggctacgtgaagatccgccattctcatgccttggtctccttgtccttcctaaaaaaccttcgcctcatcctaggagaggagcagctagaagggaattactccttctacgtcctcgacaaccagaacttgcagcaactgtgggactgggaccaccgcaacctgaccatcaaagcagggaaaatgtactttgctttcaatcccaaattatgtgtttccgaaatttaccgcatggaggaagtgacggggactaaagggcgccaaagcaaaggggacataaacaccaggaacaacggggagagagcctcctgtgaaagtgacgtcctgcatttcacctccaccaccacgtcgaagaatcgcatcatcataacctggcaccggtaccggccccctgactacagggatctcatcagcttcaccgtttactacaaggaagcaccctttaagaatgtcacagagtatgatgggcaggatgcctgcggctccaacagctggaacatggtggacgtggacctcccgcccaacaaggacgtggagcccggcatcttactacatgggctgaagccctggactcagtacgccgtttacgtcaaggctgtgaccctcaccatggtggagaacgaccatatccgtggggccaagagtgagatcttgtacattcgcaccaatgcttcagttccttccattcccttggacgttctttcagcatcgaactcctcttctcagttaatcgtgaagtggaaccctccctctctgcccaacggcaacctgagttactacattgtgcgctggcagcggcagcctcaggacggctacctttaccggcacaattactgctccaaagacaaaatccccatcaggaagtatgccgacggcaccatcgacattgaggaggtcacagagaaccccaagactgaggtgtgtggtggggagaaagggccttgctgcgcctgccccaaaactgaagccgagaagcaggccgagaaggaggaggctgaataccgcaaagtctttgagaatttcctgcacaactccatcttcgtgcccagacctgaaaggaagcggagagatgtcatgcaagtggccaacaccaccatgtccagccgaagcaggaacaccacggccgcagacacctacaacatcaccgacccggaagagctggagacagagtaccctttctttgagagcagagtggataacaaggagagaactgtcatttctaaccttcggcctttcacattgtaccgcatcgatatccacagctgcaaccacgaggctgagaagctgggctgcagcgcctccaacttcgtctttgcaaggactatgcccgcagaaggagcagatgacattcctgggccagtgacctgggagccaaggcctgaaaactccatctttttaaagtggccggaacctgagaatcccaatggattgattctaatgtatgaaataaaatacggatcacaagttgaggatcagcgagaatgtgtgtccagacaggaatacaggaagtatggaggggccaagctaaaccggctaaacccggggaactacacagcccggattcaggccacatctctctctgggaatgggtcgtggacagatcctgtgttcttctatgtccaggccaaaacaggatatgaaaacttcatccatctgatcatcgctctgcccgtcgctgtcctgttgatcgtgggagggttggtgattatgctgtacgtcttccatagaaagagaaataacagcaggctggggaatggagtgctgtatgcctctgtgaacccggagtacttcagcgctgctgatgtgtacgttcctgatgagtgggaggtggctcgggagaagatcaccatgagccgggaacttgggcaggggtcgtttgggatggtctatgaaggagttgccaagggtgtggtgaaagatgaacctgaaaccagagtggccattaaaacagtgaacgaggccgcaagcatgcgtgagaggattgagtttctcaacgaagcttctgtgatgaaggagttcaattgtcaccatgtggtgcgattgctgggtgtggtgtcccaaggccagccaacactggtcatcatggaactgatgacacggggcgatctcaaaagttatctccggtctctgaggccagaaatggagaataatccagtcctagcacctccaagcctgagcaagatgattcagatggccggagagattgcagacggcatggcatacctcaacgccaataagttcgtccacagagaccttgctgcccggaattgcatggtagccgaagatttcacagtcaaaatcggagattttggtatgacgcgagatatctatgagacagactattaccggaaaggaggcaaagggctgctgcccgtgcgctggatgtctcctgagtccctcaaggatggagtcttcaccacttactcggacgtctggtccttcggggtcgtcctctgggagatcgccacactggccgagcagccctaccagggcttgtccaacgagcaagtccttcgcttcgtcatggagggcggccttctggacaagccagacaactgtcctgacatgctgtttgaactgatgcgcatgtgctggcagtataaccccaagatgaggccttccttcctggagatcatcagcagcatcaaagaggagatggagcctggcttccgggaggtctccttctactacagcgaggagaacaagctgcccgagccggaggagctggacctggagccagagaacatggagagcgtccccctggacccctcggcctcctcgtcctccctgccactgcccgacagacactcaggacacaaggccgagaacggccccggccctggggtgctggtcctccgcgccagcttcgacgagagacagccttacgcccacatgaacgggggccgcaagaacgagcgggccttgccgctgccccagtcttcgacctgctgatccttggatcctgaatctgtgcaaacagtaacgtgtgcgcacgcgcagcggggtggggggggagagagagttttaacaatccattcacaagcctcctgtacctcagtggatcttcagttctgcccttgctgcccgcgggagacagcttctctgcagtaaaacacatttgggatgttccttttttcaatatgcaagcagctttttattccctgcccaaacccttaactgacatgggcctttaagaaccttaatgacaacacttaatagcaacagagcacttgagaaccagtctcctcactctgtccctgtccttccctgttctccctttctctctcctctctgcttcataacggaaaaataattgccacaagtccagctgggaagccctttttatcagtttgaggaagtggctgtccctgtggccccatccaaccactgtacacacccgcctgacaccgtgggtcattacaaaaaaacacgtggagatggaaatttttacctttatctttcacctttctagggacatgaaatttacaaagggccatcgttcatccaaggctgttaccattttaacgctgcctaattttgccaaaatcctgaactttctccctcatcggcccggcgctgattcctcgtgtccggaggcatgggtgagcatggcagctggttgctccatttgagagacacgctggcgacacactccgtccatccgactgcccctgctgtgctgctcaaggccacaggcacacaggtctcattgcttctgactagattattatttgggggaactggacacaataggtctttctctcagtgaaggtggggagaagctgaaccggc

SEQ ID NO: 12854 - protein, 1367 aa, Homo sapiens
  ref <308>: DATABASE ACCESSION NUMBER: Refseq / NP_000866
  ref <309>: DATABASE ENTRY DATE: 2002-11-05
MKSGSGGGSPTSLWGLLFLSAALSLWPTSGEICGPGIDIRNDYQQLKRLENCTVIEGYLHILLISKAEDYRSYRFPKLTVITEYLLLFRVAGLESLGDLFPNLTVIRGWKLFYNYALVIFEMTNLKDIGLYNLRNITRGAIRIEKNADLCYLSTVDWSLILDAVSNNYIVGNKPPKECGDLCPGTMEEKPMCEKTTINNEYNYRCWTTNRCQKMCPSTCGKRACTENNECCHPECLGSCSAPDNDTACVACRHYYYAGVCVPACPPNTYRFEGWRCVDRDFCANILSAESSDSEGFVIHDGECMQECPSGFIRNGSQSMYCIPCEGPCPKVCEEEKKTKTIDSVTSAQMLQGCTIFKGNLLINIRRGNNIASELENFMGLIEVVTGYVKIRHSHALVSLSFLKNLRLILGEEQLEGNYSFYVLDNQNLQQLWDWDHRNLTIKAGKMYFAFNPKLCVSEIYRMEEVTGTKGRQSKGDINTRNNGERASCESDVLHFTSTTTSKNRIIITWHRYRPPDYRDLISFTVYYKEAPFKNVTEYDGQDACGSNSWNMVDVDLPPNKDVEPGILLHGLKPWTQYAVYVKAVTLTMVENDHIRGAKSEILYIRTNASVPSIPLDVLSASNSSSQLIVKWNPPSLPNGNLSYYIVRWQRQPQDGYLYRHNYCSKDKIPIRKYADGTIDIEEVTENPKTEVCGGEKGPCCACPKTEAEKQAEKEEAEYRKVFENFLHNSIFVPRPERKRRDVMQVANTTMSSRSRNTTAADTYNITDPEELETEYPFFESRVDNKERTVISNLRPFTLYRIDIHSCNHEAEKLGCSASNFVFARTMPAEGADDIPGPVTWEPRPENSIFLKWPEPENPNGLILMYEIKYGSQVEDQRECVSRQEYRKYGGAKLNRLNPGNYTARIQATSLSGNGSWTDPVFFYVQAKTGYENFIHLIIALPVAVLLIVGGLVIMLYVFHRKRNNSRLGNGVLYASVNPEYFSAADVYVPDEWEVAREKITMSRELGQGSFGMVYEGVAKGVVKDEPETRVAIKTVNEAASMRERIEFLNEASVMKEFNCHHVVRLLGVVSQGQPTLVIMELMTRGDLKSYLRSLRPEMENNPVLAPPSLSKMIQMAGEIADGMAYLNANKFVHRDLAARNCMVAEDFTVKIGDFGMTRDIYETDYYRKGGKGLLPVRWMSPESLKDGVFTTYSDVWSFGVVLWEIATLAEQPYQGLSNEQVLRFVMEGGLLDKPDNCPDMLFELMRMCWQYNPKMRPSFLEIISSIKEEMEPGFREVSFYYSEENKLPEPEELDLEPENMESVPLDPSASSSSLPLPDRHSGHKAENGPGPGVLVLRASFDERQPYAHMNGGRKNERALPLPQSSTC

SEQ ID NO: 12855 - DNA, 868 bp, Rattus norvegicus; identical to SEQ ID NO: 3600
  ref <308>: DATABASE ACCESSION NUMBER: EMBL / M31032
  ref <309>: DATABASE ENTRY DATE: 2001-04-05

SEQ ID NO: 12856 - protein, 247 aa, Rattus norvegicus; identical to SEQ ID NO: 3601
  ref <308>: DATABASE ACCESSION NUMBER: SWISS-Prot / AAA40969
  ref <309>: DATABASE ENTRY DATE: 2002-06-15

SEQ ID NO: 12857 - DNA, 507 bp, Homo sapiens; identical to SEQ ID NO: 3602
  ref <308>: DATABASE ACCESSION NUMBER: Refseq / NM_007244
  ref <309>: DATABASE ENTRY DATE: 2002-01-25

SEQ ID NO: 12858 - protein, 134 aa, Homo sapiens; identical to SEQ ID NO: 3603
  ref <308>: DATABASE ACCESSION NUMBER: Refseq / NP_009175
  ref <309>: DATABASE ENTRY DATE: 2002-01-25

SEQ ID NO: 12859 - DNA, 868 bp, Rattus norvegicus; identical to SEQ ID NO: 3600
  ref <308>: DATABASE ACCESSION NUMBER: EMBL / M31032
  ref <309>: DATABASE ENTRY DATE: 2001-04-05

SEQ ID NO: 12860 - protein, 247 aa, Rattus norvegicus; identical to SEQ ID NO: 3601
  ref <308>: DATABASE ACCESSION NUMBER: SWISS-Prot / AAA40969
  ref <309>: DATABASE ENTRY DATE: 2002-06-15

SEQ ID NO: 12861 - DNA, 507 bp, Homo sapiens; identical to SEQ ID NO: 3602
  ref <308>: DATABASE ACCESSION NUMBER: Refseq / NM_007244
  ref <309>: DATABASE ENTRY DATE: 2002-01-25

SEQ ID NO: 12862 - protein, 134 aa, Homo sapiens; identical to SEQ ID NO: 3603
  ref <308>: DATABASE ACCESSION NUMBER: Refseq / NP_009175
  ref <309>: DATABASE ENTRY DATE: 2002-01-25

SEQ ID NO: 12863 - DNA, 5040 bp, Rattus norvegicus
  ref <308>: DATABASE ACCESSION NUMBER: EMBL / M31725
  ref <309>: DATABASE ENTRY DATE: 2000-03-04
gaattcccgcccgctgccgccacgccaggacagccagtggctaaggccggcggggcaagcagccctgaggctggcagcagggtctgctcaccaggcggccgcagcagtgccccagccaacacccttcccgcactctaggtgtgcctgagtctccagttgattctcccggagcggagctgcggctcctctcttttggactctgcctctgcctgaaagacccaccatggggacacacgccaggaaaaaggcaagcttgctgctgctggtgctggccacagtggccctggtctcctctccaggatggagttttgcccagggaaccccagctacctttggacccatcttcgaagagcaacccattggcctgctattcccagaggagtctgcagaggatcaggtgacactggcgtgccgtgcccgtgctagccctccagccacctacaggtggaagatgaatggcacagatatgaacctggaacctggctcccgtcaccagctgatggggggcaacctggtcatcatgagccccaccaagacacaggatgctggtgtctaccagtgcctagcctccaacccagtaggcactgtggtcagcaaggaggctgtcctccgctttggctttctacaggaattctccaaggaggagagagaccctgtgaaaacccatgagggctggggagtgatgctgccctgtaacccgcctgcccattacccaggtttgtcctaccgctggctcctcaacgagttccccaacttcatcccaacggatgggcgacacttcgtgtcccagactacaggaaacctgtacatcgcccggaccaatgcctcagacctgggcaactactcttgtttggctaccagccacatggacttttccaccaagagtgtcttcagcaaatttgcgcagctcaacctggctgcggaagatccccgactcttcgctcccagtatcaaagctcggttccccccggagacctacgcactagttgggcagcaagtcaccctggagtgctttgcctttgggaacccggttccccggatcaagtggcgcaaagtggatggttccttgtcccctcagtgggccacagctgagcccaccctgcagatccccagcgtgagctttgaagacgagggtacctatgaatgtgaggcagagaactccaagggtcgtgacaccgtccagggacgcatcatcgtgcaagctcagcctgagtggctaaaggtgatctcagacacagaggccgacattggctccaacttacgttggggctgtgcagcagcaggcaaaccccggcccatggtgcgctggctgagaaacggggaacctctggcctcccagaaccgggtggaggtcttggctggggacctgcgattctctaagctgagcctggaggactctggcatgtaccagtgtgtggctgaaaacaagcatggcaccatctatgccagtgctgagctggctgtacaagctctggccccagacttcaggcagaaccctgtgagacggctgatccctgcagctcgaggcggagagatcagcatcctgtgccagcctcgcgcagccccaaaagctacaatactttggagcaagggtactgagattttggggaacagtaccagagtgactgtcacttccgatggcaccttgatcatcagaaacatcagccgatccgatgaaggcaaatatacctgctttgctgagaacttcatgggcaaagccaacagtaccgggatcctgtccgtgcgcgatgcaaccaagatcaccctggctccctccagtgctgacatcaacgtgggtgacaacctgaccctacaatgtcatgcctcgcacgaccccactatggacctcacgttcacctggaccctggatgatttccctattgactttgataagcctggaggtcactaccggagagccagtgcgaaggagaccattggggacctgactatcctcaacgcccacgtacgccatggagggaagtacacatgcatggcccagactgtggtagatggtacatccaaggaggccacagtcctggtccgaggtcccccaggtcccccagggggtgtggtggtgagagacatcggagacaccaccgttcagcttagctggagtcgtggctttgacaaccacagccccattgccaagtacacgctgcaagctcgtactccaccctcggggaaatggaagcaggttcggaccaatcctgtgaatatcgagggtaatgccgagactgcccaggtgctgggtctcatgccttggatggactatgagtttcgggtttcagctagcaacatcttgggcactggggagcccagcgggccctccagcaaaatccgcactaaggaagcagtcccctcagtggcaccatcgggactcagtggagggggaggagcccctggagagctcatcatcaactggactcccgtgtcacgggagtaccagaacggagacggcttcggctacctgctgtccttccgcaggcaaggcagctccagctggcagactgcccgggtgcctggcgctgatgcgcagtacttcgtctacggcaatgacagcatccagccctacacaccctttgaggtcaagatccgaagctacaatcgccggggggatgggcccgagagcctcactgcgttagtgtactcagcagaggaagagcccagggtggcccctgccaaggtctgggccaaggggtcctcatcttcagagatgaacgtgagctgggagcctgtgctacaagacatgaacggcattctcctgggatatgagattcgctactggaaagccggggacaacgaagcagccgctgaccgagtgaggacagcagggctagacaccagtgcccgagtcactggcctgaaccccaacaccaaataccacgtaactgtgagggcctacaaccgggccggcactggacccgctagcccttcagctgatgccatgaccgtgaagcccccgccacggagacctcctggcaacatctcctggactttctcaagctccagtctcagccttaagtgggaccctgtggttcctctccgaaatgaatctacggtcactggctacaagatgctgtatcagaatgatttgcacccaactcctacgctccacctcaccagcaagaactggatagaaataccagtacccgaagacattggccacgctctggtacagattcgaaccacagggcctggaggggatgggatccccgcagaagtccacattgtgagaaatggaggcacaagcatgatggtggagagcgccgccgcccgccctgcccatcccggacctgcgttctcctgcatggtgatattgatgctcgctggctaccagaagctctgatctcaacactgcccgccacgcccaagctggacacccaccctaacagacacagcggctgaccacagctccctttcgtccaaggtggtccaacactgtgcctgagcgtggttggcttagacacctactcccaacagtaccctttatgtaggaggtaggatattcctattctgccacaggatagaaccatgcgaggaaattttctttaagtcaagaggcactgggcagtgacttccatgataatagtactaggcctaatgcctggaccccttggggtcttggtcgaaaggaacgggcctttgattaagcagatggtcctttggggccacaagtggcactgccatctgagatcagagtaccaggcccagcaggaacatgggcagcagtggggtattgttttccctctatgaagcagagggacctcttctagtcctcactggagaagcaccatggttggtcccgacacggtcttccatgactccctggcttcctcggtagccaaggacaaggccctgggttactggggatagaagctcaaaagggttgagaggctaccccacccgatggaaaggggcaccagcctaagcccattggccatcctggtggcactgccctctcagccagcactgccaagccaatcctgtcgtcctccagatggaatggtggagtgacagagccacttcaggtggctatgtgactaaagggcttgcctcgaggagttgccttgcctcatcaagatgcttccttcatggaccctccagggtacgggcaggagatgtccatctgaacgctactctcttcccttcagctctgctgcaaacttgtgcctgcctccacctcccacaactgcaggccccagaaatcagctctcaacacagcatccattctttgtcctgggatagagaggcatccgagaagggccagcatcaaagtggccctgcctgcttccaggaatatcctccatcacctggccacacctgctccccagaactgcctggactactctcttcagtccccacaagaaaaagggttaataaggggggggggggtggcctgccttgagttctgggtagttaccagggatagaccagactacgggagctgaagaagccttataacttgacttatccgtaccctacacttaacagacgaggaaatggaggtgcagaagggttagggacttcttgggggtcacatggtctgtaaggacaaggcatggtcagcacagggtctcctccccacctgtgggaggctctatagagagagggaggatgttgagcagtcacagcctgtcctctaggactctggaggactctggaggaggagccctctgcttcaagaggttctggctggtgagatggacaaatgagctccaaccaaggcataggcagattccaggagtcaatggcctggggcagccttctgctgggaactcggcagggagcactgtctggaagcctctcgggcttgctcatttcaagaagaggccaaagcaaggacagagttccttagacgaggaccctgcagcagcacgaccagaaaaccccagtgtccacgccctcagcccacgggggcagcagagcaggcatttcaagatgcacttgccctgctgctccttaggccatttctgtagtttacagttagagctctattttgttatgggtttttaaacttcaagccttgctctgtttttctgg

SEQ ID NO: 12864 - protein, 1040 aa, Rattus norvegicus
  ref <308>: DATABASE ACCESSION NUMBER: SWISS-Prot / AAA42201
  ref <309>: DATABASE ENTRY DATE: 2002-06-15
MGTHARKKASLLLLVLATVALVSSPGWSFAQGTPATFGPIFEEQPIGLLFPEESAEDQVTLACRARASPPATYRWKMNGTDMNLEPGSRHQLMGGNLVIMSPTKTQDAGVYQCLASNPVGTVVSKEAVLRFGFLQEFSKEERDPVKTHEGWGVMLPCNPPAHYPGLSYRWLLNEFPNFIPTDGRHFVSQTTGNLYIARTNASDLGNYSCLATSHMDFSTKSVFSKFAQLNLAAEDPRLFAPSIKARFPPETYALVGQQVTLECFAFGNPVPRIKWRKVDGSLSPQWATAEPTLQIPSVSFEDEGTYECEAENSKGRDTVQGRIIVQAQPEWLKVISDTEADIGSNLRWGCAAAGKPRPMVRWLRNGEPLASQNRVEVLAGDLRFSKLSLEDSGMYQCVAENKHGTIYASAELAVQALAPDFRQNPVRRLIPAARGGEISILCQPRAAPKATILWSKGTEILGNSTRVTVTSDGTLIIRNISRSDEGKYTCFAENFMGKANSTGILSVRDATKITLAPSSADINVGDNLTLQCHASHDPTMDLTFTWTLDDFPIDFDKPGGHYRRASAKETIGDLTILNAHVRHGGKYTCMAQTVVDGTSKEATVLVRGPPGPPGGVVVRDIGDTTVQLSWSRGFDNHSPIAKYTLQARTPPSGKWKQVRTNPVNIEGNAETAQVLGLMPWMDYEFRVSASNILGTGEPSGPSSKIRTKEAVPSVAPSGLSGGGGAPGELIINWTPVSREYQNGDGFGYLLSFRRQGSSSWQTARVPGADAQYFVYGNDSIQPYTPFEVKIRSYNRRGDGPESLTALVYSAEEEPRVAPAKVWAKGSSSSEMNVSWEPVLQDMNGILLGYEIRYWKAGDNEAAADRVRTAGLDTSARVTGLNPNTKYHVTVRAYNRAGTGPASPSADAMTVKPPPRRPPGNISWTFSSSSLSLKWDPVVPLRNESTVTGYKMLYQNDLHPTPTLHLTSKNWIEIPVPEDIGHALVQIRTTGPGGDGIPAEVHIVRNGGTSMMVESAAARPAHPGPAFSCMVILMLAGYQKL

SEQ ID NO: 12865 - DNA, 4548 bp, Homo sapiens
  ref <308>: DATABASE ACCESSION NUMBER: Refseq / NM_005076
  ref <309>: DATABASE ENTRY DATE: 2000-11-01
agcggcccagacaggggctggcggcccggccggccccggctcaccgactcgggcagcatccacctgccccagccaacacccttctctcgccccaggtcctttctcagcctccagctgggctgtccccaagctgagctgaggctcttctcctccgatccccacctctgcccggacatccaccatggggacagccaccaggaggaagccacacctgctgctggtagctgctgtggcccttgtctcctcttcagcttggagttcagccctgggatcccaaaccaccttcgggcctgtctttgaagaccagcccctcagtgtgctattcccagaggagtccacggaggagcaggtgttgctggcatgccgcgcccgggccagccctccagccacctatcggtggaagatgaatggtaccgagatgaagctggagccaggttcccgtcaccagctggtggggggcaacctggtcatcatgaaccccaccaaggcacaggatgccggggtctaccagtgcctggcctccaacccagtgggcaccgttgtcagcagggaggccatcctccgcttcggctttctgcaggaattctccaaggaggagcgagacccagtgaaagctcatgaaggctggggggtgatgttgccctgtaacccacctgcccactacccaggcttgtcctaccgctggctcctcaacgagttccccaacttcatcccgacggacgggcgtcacttcgtgtcccagaccacagggaacctgtacattgcccgaaccaatgcctcagacctgggcaactactcctgtttggccaccagccacatggacttctccaccaagagcgtcttcagcaagtttgctcagctcaacctggctgctgaagatacccggctctttgcacccagcatcaaggcccggttcccagcagagacctatgcactggtggggcagcaggtcaccctggagtgcttcgcctttgggaaccctgtcccccggatcaagtggcgcaaagtggacggctccctgtccccgcagtggaccacagctgagcccaccctgcagatccccagcgtcagctttgaggatgagggcacctacgagtgtgaggcggagaactccaagggccgagacaccgtgcagggccgcatcatcgtgcaggctcagcctgagtggctaaaagtgatctcggacacagaggctgacattggctccaacctgcgttggggctgtgcagccgccggcaagccccggcctacagtgcgctggctgcggaacggggagcctctggcctcccagaaccgggtggaggtgttggctggggacctgcggttctccaagctgagcctggaagactcgggcatgtaccagtgtgtggcagagaataagcacggtaccatctacgccagcgccgagctagccgtgcaagcactcgcccctgacttcaggctgaatcccgtgaggcgtctgatccccgcggcccgcgggggagagatccttatcccctgccagccccgggcagctccaaaggccgtggtgctctggagcaaaggcacggagattttggtcaacagcagcagagtgactgtaactccagatggcaccttgatcataagaaacatcagccggtcagatgaaggcaaatacacctgctttgctgagaacttcatgggcaaagccaacagcactggaatcctatctgtgcgagatgcaaccaaaatcactctagccccctcaagtgccgacatcaacttgggtgacaacctgaccctacagtgccatgcctcccacgaccccaccatggacctcaccttcacctggaccctggacgacttccccatcgactttgataagcctggagggcactaccggagaactaatgtgaaggagaccattggggatctgaccatcctgaacgcccagctgcgccatggggggaagtacacgtgcatggcccagacggtggtggacagcgcgtccaaggaggccacagtcctggtccgaggtccgccaggtcccccaggaggtgtggtggtgagggacattggcgacaccaccatccagctcagctggagccgtggcttcgacaaccacagccccatcgctaagtacaccctgcaagctcgcactccacctgcagggaagtggaagcaggttcggaccaatcctgcaaacatcgagggcaatgccgagactgcacaggtgctgggcctcaccccctggatggactatgagttccgggtcatagccagcaacattctgggcactggggagcctagtgggccctccagcaaaatccggaccagggaagcagccccctcggtggcaccctcaggactcagcggaggaggtggagcccccggagagctcatcgtcaactggacgcccatgtcacgggagtaccagaacggagacggcttcggctacctgctgtccttccgcaggcagggcagcactcactggcagaccgcccgggtgcctggcgccgatgcccagtactttgtctacagcaacgagagcgtccggccctacacgccctttgaggtcaagatccgcagctacaaccgccgcggggatgggcccgagagcctcactgcactcgtgtactcagctgaggaagagcccagggtggcccctaccaaggtgtgggccaaaggggtctcatcctcagagatgaacgtgacctgggaacccgtgcagcaggacatgaatggtatcctcctggggtatgagatccgctactggaaagctggggacaaagaagcagctgcggaccgagtgaggacagcagggctggacaccagtgcccgagtcagtggcctgcatcccaacaccaagtaccatgtgaccgtgagggcctacaaccgggctggcactgggcctgccagcccttctgccaacgccacgaccatgaagccccctccgcggcgacctcctggcaacatctcctggactttctcaagctctagtcttagcattaagtgggaccctgtggtccctttccgaaatgagtctgcagtcaccggctataagatgctgtaccagaatgacttacacctgactcccacgctccacctcaccggcaagaactggatagaaatcccagtgcctgaagacattggccatgccctggtacaaattcggaccacagggcccggaggggatgggatccctgcagaagtccacatcgtgaggaatggaggcacaagcatgatggtggagaacatggcagtccgcccagcaccacaccctggcaccgtcatttcccactccgtggcgatgctgatcctcataggctccctggagctctgatcctggaacccctccctctgcgccgcagctggacgccacctccgacggacacagccagccccttcctgctgccaaggtggcctgacactgtgccagagagtggctggttttaaatacctactttaaacagtgccctttttgtaggaggtaggatattttatattctgccgcaggatagaacccacgcaaggattttctttaaattgagaggcaccaggcagtaacttccatgatgacactgacgcctatacctgagctctaggctgcctggagggaaggaacaggcccatgggaagaagggggttttaaaaacatgtcttcaactcagcagagatggccctctgggaccctatacgcactccgccacttgagagcagtcctaggcccggcaggaacaccagacatgaacaggttgaagaactggagcgaagtgcacacctcaccatccttcagtctaaggaagaagggcaagccctgggaccaagagctctcccgccttctccctcgagcagcagcaaggaccctgacgctgtccccgataactccctaggggctcctgcctgcccaagcggctgagaaccagcgccccgatgcctgaggctgggagcctgagccccttcagctttgaggggggtgatactccaggctgtttggggtgggagccaaaaagagttgagaggccagggcccttggtggaaaggggcaccagccttggtctgagatagtcacaacccaggtgacgatgccctctcagccaacactgccaacctgaccctgtcatcccgattgacagcgccacttcaggtggctgggtgactaaagggcttgtcttggtggggtctcccacccctccaagacccattctgcacagtccctccagggtttgggcaggagatggccaatcatgcgcccacctctccagtgctgcctgcagtcagctcggcctccccgacctgcagccccagactctgctctcccagcactgactcactcctgcctgggaggggaatgcagcattcatgctggtgtgtcctggtattgggaggtttctgggaagggcagaggataaatgtggccctgcctgctcccaggtatacctaggaccacctggccagatccgctcccagacggccttggactgcttgcatttccccggagaaaaaggggttaataaatgggccatcctttcctgaaaaaaaaaaccccccccccccaaaaaaaaaaaaaaaaaaaaaaaaaaaaaa

SEQ ID NO: 12866 - protein, 1040 aa, Homo sapiens
  ref <308>: DATABASE ACCESSION NUMBER: Refseq / NP_005067
  ref <309>: DATABASE ENTRY DATE: 2000-11-01
MGTATRRKPHLLLVAAVALVSSSAWSSALGSQTTFGPVFEDQPLSVLFPEESTEEQVLLACRARASPPATYRWKMNGTEMKLEPGSRHQLVGGNLVIMNPTKAQDAGVYQCLASNPVGTVVSREAILRFGFLQEFSKEERDPVKAHEGWGVMLPCNPPAHYPGLSYRWLLNEFPNFIPTDGRHFVSQTTGNLYIARTNASDLGNYSCLATSHMDFSTKSVFSKFAQLNLAAEDTRLFAPSIKARFPAETYALVGQQVTLECFAFGNPVPRIKWRKVDGSLSPQWTTAEPTLQIPSVSFEDEGTYECEAENSKGRDTVQGRIIVQAQPEWLKVISDTEADIGSNLRWGCAAAGKPRPTVRWLRNGEPLASQNRVEVLAGDLRFSKLSLEDSGMYQCVAENKHGTIYASAELAVQALAPDFRLNPVRRLIPAARGGEILIPCQPRAAPKAVVLWSKGTEILVNSSRVTVTPDGTLIIRNISRSDEGKYTCFAENFMGKANSTGILSVRDATKITLAPSSADINLGDNLTLQCHASHDPTMDLTFTWTLDDFPIDFDKPGGHYRRTNVKETIGDLTILNAQLRHGGKYTCMAQTVVDSASKEATVLVRGPPGPPGGVVVRDIGDTTIQLSWSRGFDNHSPIAKYTLQARTPPAGKWKQVRTNPANIEGNAETAQVLGLTPWMDYEFRVIASNILGTGEPSGPSSKIRTREAAPSVAPSGLSGGGGAPGELIVNWTPMSREYQNGDGFGYLLSFRRQGSTHWQTARVPGADAQYFVYSNESVRPYTPFEVKIRSYNRRGDGPESLTALVYSAEEEPRVAPTKVWAKGVSSSEMNVTWEPVQQDMNGILLGYEIRYWKAGDKEAAADRVRTAGLDTSARVSGLHPNTKYHVTVRAYNRAGTGPASPSANATTMKPPPRRPPGNISWTFSSSSLSIKWDPVVPFRNESAVTGYKMLYQNDLHLTPTLHLTGKNWIEIPVPEDIGHALVQIRTTGPGGDGIPAEVHIVRNGGTSMMVENMAVRPAPHPGTVISHSVAMLILIGSLEL

SEQ ID NO: 12867 - DNA, 18820 bp, Rattus norvegicus
  ref <308>: DATABASE ACCESSION NUMBER: EMBL / M33312
  ref <309>: DATABASE ENTRY DATE: 2000-03-04
gaattctagtacggtagccctggctttcatcaactagttagtgccaaatatttgagaaaagttacaggttcaagctaataaaagttgcagagagtataaaagaatgcagattagacaagaaaaaattaattagagcccttctagccaacaaagcctcagatccaggagaaaagactaccatagaaatggccaaaggcttatttatcaaagaaactgggctcagtggcagcaggatgaccaccttgcctgtgtttattgttgccacagcactgttggataaagatgcaaataaattaactttgggacagaagttgatcatgactgctcctccccctgcccccgcaattctgattgaggctcagtaatgcctacatgcttcattatcacactttactaatcagccctggctgagatattttccagccacctgtttccctgaaccctgcgactcttccacccaaccctgacttgggctgtccacttcatcaattcgatgaggttcaggcccagatacacaataccagaccttacttgaggaactctcatccatcagaaacagagcatacctggttcacggacagaagtagcttcatccataagggtcagaggagaacaggggcagcaataacaacagaaggaaaggtaatctggactcagtctcttccttccaggcacttcaactcaaaagaacaaactaagaacattaacacaagtcctcatcatgggaaaaggactggctgttagcatctgcagggacagccagatatgcatttacaactactcatgtgcacggagccatttacaaggaacaacagctcctaacagcagaaggaaaaactgtcagaaataaagataaaactctacaggacatcaaaaagaaaccaatggctagagataacagtctgactgataaggcttctaagaaggtagccttaaaggaaacagccaacactagattggccattgtcctacctgaaccacctagagtaactgataaatgcagaaaaagaaattaaatgggctggtgatggtcaactgaaggtaagcgaatattgcccacttctcagaaagatccacagtcactcacttgggagtaaaatgaatgacaaactttaaagtttgccagctgaccaacactcacaggaagcccaaacatccaaattcctgactgcgagttaagagacttggagcctactgggaaaattgatttttttcagaaatcaagcaagaaagatatggctcaaaatatctgctgatatttgtagacattttttttcgagatagatggatagatgtactaggagagatctttccgatgtttggagcacctaaggtaacaggatcagacaatgggcctgtcttcatatctcaggtaagtcagggacttgctaagatcttggggactaattggaaactccattgttcatatcatccccagagttcagggcaggtagaaaggatgaatagaactctaaaagagaccttaacagaattagccttggagactggtggggactgggtgaggctctttccctttgccctatattaggtgtacatggcattctagctcccattgtatctagcctacagttggtagctattacagaactgaaaaatgataatttaagatttaaggtcagagctaccaaataggctcatgaatttgtttgggcctaaattatgtaccttctgtgaagcaggcctggttccagaaccacacaagtcaaaagagactgggtctctatgaagagatttcaccaaggtgcgactaaacccatgtgaaaatggcaattcatcatcctgttgatcatgatcaccacctgggtgtacaacaaccacaccagaccagttcctccaatgaagaactctgcctggctccagctgtaccaaaatagagggttcaaaaggacaccaagcccttcaagttaaagttgactcagtctcagtcctgagtctcttgcccctgctaactctatgtctatatatactgtatgtcttagatccccccctgttaggaaggtaccctagctggatccttgataattttacttttatttctgacttttggcccctgtattttaagttgcttagtagtttataagagaattcagtcaagttaattatcttaaggcaacactatctacagctggaagcagggaagcaagcatatgagttagaagactataagcttcaagatcaaagctatgctaaaagaaaaggggggaatgaaaagccagagttggggtcaatctgaggccaatgagaaaaacccaccattaacatccaagcacagaacgacccttctcttccagaaagagtaaagctagtttagttcctggaacagctacaagccaaactgttgaacaaagccacatgtaactccccatccaacctccagaaagtcccagaatggcacactgaccacaagtcattttggaggttacttcaccccactaatagtagtactcttcctagttactgttgtgcaaattctgccccaattgtttgtaaggtatatacagacccagttagagtctgctcagggtcttctctttctgaaagggagtcaaccccgacgcattaaaataaagctagtcttggttttgcattgattagcacctccttgagtctcactcaaggggtcccggaaagggtcagattagacctcatatacctctgagcacagcttgtatggtgactaagatacaggatacccacaggctgggattagagagtttaaaccaaagatctttcatccatgtgctccatgcctgccctgtgcccagggggaaacatggattctaattacagaagcctccctaaggatcttaatgggaaccaagtaggagacttttccagttagaagccttctgacaactggggtttccccatattggtagtttaggttgttatttcacaaaactacaattccttcaccaactggagttctgagttattctcctctagtctggaaaatgatctgctaaaatatagctgtggttttctacccttttcaaagccatacatagacagggaaggttgcccatccttccctgaagttgaagatccttttagaagtcaatgcacccatcagtggtgataaatgcctttaatcccagtatgcagcaaactctgtgagtttgacgccaaattggtctacagagtgtgttctagaacagtcagagctaaagagagaaacactctgtggaaaagaaagaaagaaaaaagaaaggaaggaaagaaggaaggaaggaaggaaggaaggaaggaaggaaggaaggaaggaaaaagaaaggaaggaaggaaaaaggtacagagagagggaaagagggagggagaaaaataacatatatgaagacacagtacaggaccaatctgggctcaggtgcccactttagtctcctactggaattttcatccacttgtaccagaaactcagcacccacagatccttcttgccatgtgaccttccagtccatagtttggaatctttcctgttttccttactaatatttttctcctaataaaaagactaaaccatctagactctaggactccagagatgactctgtgggtaagagcacttgttgctcttgtagaagacccaggttttattcctagaacccacatggtggcttacaaccatgtgtgaccccatttccaaaggattcctctaaatcttttggcatctttggacagtgtgcccaattgttacccagacttaaatggaagagaaaccttcatattacataaaaaattaacacaataagatccataaagaaatatataaaagaagataatcttttttaaaaaggatacattggatacattgccaggcctggagagatggctcagtggttaagagcactgacagctcttccagaggtcctgagttcaaattcccagcaaccacatggtgactcacaattatctgtaatgggattcaatgcccactactggtgtgtctgaagacagtgacagtgtactcatatacatgaaagaaataaatgaatcttgagaacaacatttaatgcctgaagccatgtttcctgtattgttccagtcaaatctaagaatgtgaattctatcacagaccacaacatttacatctatgagggctttcttcatgagctcaaccatacaaatatagatttttagttctagatttgatctggtggacccagaaatggacagcctcctgataatagccacagtccccaatacagcaccaatctcatcatagcatttgaagagtgtattatatgttggcctgttcaccttgtccactaaaaccctcagcttggtccaccaaagcctctttgactgcattgtatcaacacaccaaagcacaccgaggctttaagaattttgaagtaagcctgccacccagaggtcttcctatttgcccatgttgtgggtgttgcaacaaagacagggtcagtgttaggagataggattggagggtaaaagactcaactagacaaacaggagcaaaggccatcctgtgtccctgggagtataaaggtactatctcagccttggctatcagcctgtcaatcctcactggccactatgctggacacaggactgcttctggtggtcatattggcctccctgagcgtcatgctcttggtgtccctctggcagcagaaaatcagggggagattgcctccaggacccactcctttgcctttcattggaaattatctgcagctgaatacaaaagacgtatacagttccatcacacaggtatcactggatgaggggatggatgggacatgggagcacaagaggctgtgatgttttgcatgttttgtggcagaagattcatagaggaatccaaagtcttgtattagtggagtttagaaagataaggagctatttcaagtctttggtttgttgtttgttgtttgttttgtttgttgtttgtttctttgtttctttgttttttcaatcatttatttgtagagtaacacataatctgacctctgtgtactggtccagttcagtgaataagtcatctaacagcccccatctaccccacatcagctcagtgagcgctatggtcctgtgttcaccatccaccttgggcctcgccgggttgtggtgctttatggatacgatgcagtcaaagaggctttggtggaccaagctgaggagttcagtggacgaggcgaacaggctacctacaatacactcttcaaaggctatggtgaggaggataccacattggggaacatgcccaaggacatttgttggcgtcatttaagtagccttcatactaactcatctctccctcaaggctgtacagagttctctgaatttctctccatatccatgttgaatgttggctctcattgtgaccctccctagcatttctgagattgaaaacagacttttgcaaattctgtgggttctttcttccatccttctctaccgttttcttccgccctttctaccacctatcactagataggaaagaaaaggagatagaggtgaaaggggacattactgttagattatttcctgctgattaggagtgacgagctccttagggaaagttttatcttctctgtcaggatatctaatttcttcttgttgttatttctttacataagactacttaacaaatcacaagcaacagcaactaaccaatagccaaaaccaatttctcagggtccttgcatttacacaaccttgaggagtcccagtatcctgagtgtcacacactctcagaaactatctgcagctggcaaaatcataacctcctgctttggacaacctgaaccagccccatatgccatacctgggagtaaacagaaacatatttctataatagttctgtatttttcaaagaaatcaaatttcttactacatctggccattgctgctcttctctctctctctctctctctctctctctctctctctctcacacacacacacacacacacacacacaaacacacacacacaaacacacacacacaaacacacacacacaaacacacacacacacaaacacacacacacaaacacacacacacgcacgcacacacacacaacctctcggcattctcctagatggatgactcctttttaatttagctgatatttttatccttcttaaacatttatccacacacagagcatcagttgcaggtctcaggcattcactcctgatgcctctggattggttttttagattctttgttcttacttttccatctatgggtgctgggctctcaagcacatctctgcacagtgtgtgtgcctggtgcccatggaagcaaaaagatggagtcagatctcctgaactccaggggttccctgagttccagggttatgagctgccaggtgagtgctggggtacaagcacaggtcctctgcaaggtcagccagtgctcttgagtgcagagccagctttgctgccccccactgcctatatttttaaatgctgttttacatactccatgtgttgtccctaagatgtgtataatgcttatagaacgtcacagtctggtaagtgctggccaaagctacagaagtataaaatggccttgaacagcaaaacactggttataagcaagaaaggtcaaaataaagagaaaatccacaaagagccaaatatctttataacattaattctgtagttaaaatttaacacagagagtgtatctcgttccttgaagaactgaaggacacacaaatgactacttctacctagggtcaaaatatagcggtgactacagctcaagacacacaaaaccagagtcaagaatcagggagtggtaataaaataataaaaaatcctggctcagggtttcttcccacctttccctgatgaaaggcacacacagcctttatattttagtctgccttatgcagcacaatagctgggcagctgcctaccctccatgctgttagaatccattttcctattgaaagccccaagttaatactttacaagtttctttataccatatttgctattcttgacccaactgaggagcccttttggccacactgtcttggcccatagcacatggtgtctctccttctaccttctgctctttcttcttccatggcttccacagaggctcctcaatcccattctccttcctcatgctctctagccccagaaaactaagcaccacaagtctcttctcccagctattagctgctgacatctttatttaccaatcagaatgaactgcgggcaggatcactcagacaaactacagactccaaatcttagaggccaacacttactgttataggaaacaataaaagacaaaaacctcaacaccagggtatgtttctgggtaggctgtccttgctttaatggggatttgctgttttcagaaaatgctcaatattgattgattttgccatttccaggaccctttgctgcattctgtctgtaagtctctttttatttgcctggctgacttgtttcaactttctttctctgactgtgtctgatgcacagtctgtgtttgtgtcttttgtgtccttgccatttctatccaactttgtctcttttctttcccccttagaacccctttccagggtgggcctcatccatcctcagcctcagtctacttctcctgaccccttatatttatatctctacaggcgtggcattcagcagtggggagcgggcaaaacaactcaggcgcctctctatagccacattgagagattttggtgtgggcaagcgtggtgtagaggagcgtatcctggaggaggcaggctatttgatcaagatgttgcagggcacttgtggtaagcaagagaccattaagtgtttgggcaagagaaagaacatccctgacacctagaccctatgggttgtggataagaagggcggggaagaccgcctaccaaaccatccccagaatctggtgctgagagattggtgcctcactccaattcccacaccatctgctaactcttctccctcataatgccaatgtcttccaaacaatgtcacccctctcaggagcccccattgaccccaccatctacctgagcaaaacagtctccaatgttattagctccattgtcttcggggaacgcttcgactatgaggacacggagttcctgtcactgctgcagatgatgggtcaaatgaacagatttgcagcttcacccacagggcaggtaacagatccagctctgccaattgtccttatagtgtcccacattgaccataccaacaaagggcaaggaccaccctgactctcatggctacaaacaaaagctcccctcaaaaacagaagctcccctcaaaaccagcctttacttcagaaaactgaacctttacatcagagcccacagaagctatccagtgctcacaatctaatgtcctctggatatctcagtagcctgagaacacagccctctgcttgactctcttccctgggcaggtttctccagcttaacctctaataaatcctctatgtggtcctcctgaaaatttagacaactgcccaagggatacaagtgaccacctctggccccctcctccaatcctgaacacctacctagttctgcaaaactgtggtcagtaaagctattcagtccatacacccagttctccccaaagatcccactgacacaatggcacaaaagtcacctgttgtctcaggtaaattcaggaatgagtagacaggcacctcaaccaaggcaaccaagcacagacctctggatggactgtttccccaaacacccatatgtctcccagctacacacaacccacatcaagacaatatctgacaggtgtgtctcacaccttataacctgaaccaccccaccatgaagacctgactatgtgaaaaaccgattctaatctcaaacaaatatcaagacatctaatcttagccctctcaaatgcccaaacatatagatacttgattcactgcgacactcatgtcctgaatactagaaacctggagtaatggtctgatccaaaaatcagttaaataactgaatgtctactaatgttcccttttgatccagttcattgggattgtaagacaatgaccttcattctttaaatcacctagaaaactgtggtctctggggcctctgacagttcagtggtttaagagcatgcactgctcatcctgaggaccgagttcagttcccactacctatgctgaacatttcaaaactctatgggagtacacctgcaccgtgcacataattaaaagtaaaatattcaaacgaatataaagagttctttcaagagtggaggtgctgtttgttgcaattcatcctaacataaatacatgaacacctggatggatcccttgagactcgacccactcccacgggtgttgccactgacaagccttttcttttctcctcccaccccccagctctatgacatgttccattcagtgatgaagtacctgcctggaccacagcaacagatcatcaaggttactcagaaactggaagacttcatgatagagaaagtgaggcagaaccatagtaccctggaccccaattccccaaggaacttcattgactcctttctcatccgcatgcaagaggtgatcccaatcatggtggatggaatgtctaaaacagggcagctctaaatcatcctagaaaaggaggaggaatataggcccattaagtgcccatgattctcctcacagtcccggttatagttaaacctcactctttcacctgttgagccttatccaagccagggtatgggttagcaaattaccatgacaaccgatattccagtgttcccctatgagacactgttttcagtgttcaactacttagcatgcactgaagctactgtcgaagaccctgtggagcctaaacttcgcaaagagggaaagtgtgcccagacttgcatgctgactttatggagacagaaaactatacagccttgcctctatggctctcaggcttttactattagccacatggtctctagcatttcatatctctgttaggaaatacacatcagtacacatcagtggcctaagacctgggtttttttttcttttgtctgttctagtaatttttttattgtttttcatttttgtgtttttttcttttattggattttttatttctatttcagatattatcccctttcttggtttcccttccagaaacctgctatctcctcatgcttctatgaggattctctcccacccacacaacactccctgccacctccctgtgctgacattcccctacactggggcatcgagcccagacaggaccaagggtctctcctcccattgatacccaacaaggccatcctctgttatacatatggctgaagcaataggtacatccctgtgtactcttgggatggtttagtcactgggagctctggtgggtctggttggttaatattgttgttcttcttatagggtggcaaaccccttcagctccttcagtcctttctctaactcctccatatgggaccattttctcagttcaatggttgactgcaagcatctgcctctgtaattgtcacgctctgcagagcctctcaggagacagctatatgaggatcctgtcaacatatatttcttggcatccacaatattgtgtgagtttagaggatgtcaatgggatgaatccacctgtagggcagtctctgaatggcctttccttcagactctgctccaaactttgtctttgtatttccttctttgagtatttttgttccccctttcaagaaggactgaagcatactcacttgagtctttcttcttcttgagtttcatgtggtctctgaattctatcttgggtattccaagtttttggactaatatttacttctcagtgagtgcataccatgtgttgggttacctcacttaggatgatattttttagttccatccatttgcctaagaatttcatgaagtcattatttttaatagcagtgtagtactccattgtgtaaatttactatattttttgtatatatttctctgttgaagaacatctagtttctttccagcttctggctattataaataaggctgttatgaacatagtggagagtgtgtctttgttatatgttggagcatcttttgagtatatgcccaggaatggtatagctgagtcctcacataatactatgtccaattttctgaggaacctccaggatgatatccagagtggttgtatcaaattacaatccaccaacaatggaggagtgttactctttctccacatccttaccagcatctgttgtcaccttcgtttttgacctttgccattctaactggtgtgaggtggaatctcagagttgttttgatttgcatttccctgatgactaaggaggttgaacatttctttaggtacttctcaaccatattcctaagctgagaattctttgcttagctctttactccatttttaatggggttatttgattctctggagtctaacttcttgagttctttgtatatatttaacattagccctctatcggatgtgggattggtaaagatcttttcccaatctgttggttgtcgatttgtcctaatgacagtgtcctttgccttacagaagctttgcaactttatgaagtagtatttgtcaattcttgatcttagagcataagccattggtgttttgtttaggaaactctccctggtgcccatgtgttcaagaccctttcccactttctgttctattagttccagtgtatctggttttattttagtttaattttatttttcttggataattatgtattacacatcaaatgttattccctttgtcccctctctcatatccccttcccctccctctgcctctatggggatgctaccacccccatccacccactcccacctcaaccccctagcattcccttacattgagaaaaagagccttcactagaccaagggcttttcctcctattgatgctggacaatgccatcctttgctacatatgcagctgaagccacgggtccttccatgggtacgctttggttggtggtttaggccctgggagctctcgtggagtctggttggttagttgatattattcttccatccctaaaatgaatgacagtcacctagacagagaaatgagcaaagcttctcatgcaaacccaagactgctaacacagcctggagatctttttccaacgattggtctggaccctatgagaactagatccaaaggaaattgcagaagtgctgcctattgcatccctctcctccatgaggaacttaatccacagttgacggctgtttagagacgatgaaataatattcctttgcagtgtggctactagtaaattgacctttctcaagtaaagaacccctcgcccatatgcatgcagccacacctaattataagcagttacccacaacacccccaacaaacaggaaaataggaaggagacttattaggaataagaaatggttcaaaaaaatggaaagtagaaaataatagaggggaatacgtttaaagtgcatttcatgtatacgtctgaaaaataaggactcaaggttcagtgggtatggaaggggattcatctgggagggtttggaggaggggtatgaatatattcacaatacaataaatgaaattctcaaagaattaataaaattatttataaaagaattactagaaatgtttcagaaaattaaaacccttaatgttccccaaggatgacaaaatgatagatttatgccctctctctctctctctctctctctctctctctctctctctctctctctctctctgcaggagaaaaatggcaattcagagttccacatgaagaacctagtgatgacaacactaagcctcttctttgctgggtctgagacagtcagctccacactacgctacggcttccttctactcatgaagcatccagatgtggagggtgaggctggctatgtggcagggaagttgggaaccgcagactctccaactgcttacaacctaacaatgaccctcacttctcccaggttcctggatgctcagtcatgctcagctatgcagagacaggggcatattaaatgcataaacacagttctcacaaacttaaaatattagacattcccaaattgatttcactctgacttccagatctctgctctctgttctcttccctgactcctgcttcttctccccaccatgattctgtcacgaaaaggataaaatgaccctgtccagcatttaggtatggatatatgtttaaatggtttaaatgcatgttatttacagagacatgtaatacatgcagtggtacacatgtgaactattccacctgctttgaggcctctggatttttaaaaataccccatctccgcttgtctttcagccaaggtccatgaggaaattgagcaggtgatcggcaggaaccgacagcctcagtatgaggaccacatgaagatgccctacacccaggctgtgatcaatgagatccaaagattttctaacttggctcccttgggcattcctcgaaggattatcaagaacacaaccttccgtggcttcttcctccccaaggtagcagccatgcccatccaggaggggcctccagcccacttactgatgcttcagggcttctttccatctgtagctatctaactccactctaattcctccaaccaaagaattcatccacatgtccccaaattcttgtccagctgctttgaactccattttctatctactcttctgccttgctaccttccaatctctcaactcctgggctagaggcaaaggcctgctgtcacactaacaccctatcttagcacatgatcccctggagctcaaatctccaattgctgatggcacatatcgtagcccctcaaatctcctattccctaatgccttttcctgaggagacctccaactctgtgccttgcagttgtctatatttggacatcctttctccatcaacccatcttctaaaatctcctttcttccctcttccagggcaccgatgtgttccctatattaggttctctgatgacagacccaaagttcttccctagccccaaagacttcgacccccagaacttcctggatgacaagggacagttgaagaaaaatgctgctttcctccctttctccactggtaaggagacagtgggttattgaactactgttcacaccaacatgggtagcacatgccagcttccctgtctgtgatgctgcctagaatcaggctaaccaggtatagcccctgcacctcccaagcaccagacatgctggatgcaggtgagaggatccctgggaccagtgatctgtgtcagagaccggggaggggttgggaataccaactttcctaggtgatgctcatgcaagcaatttcttcacactctttctaatgcagcttttaaataattgtttgtttttctttattttttaagtaatttatttaatgtgcaatggtgtgaggttgtcagatgccttggaactgaacttatagatgattatgagctgccatgtggctgctgagaattgaaccttggatcttcagaagaacagacagtgctcttaaccaatgagccatctcccagccccatcttcagactcttaaaagtgggataacaaccaggtggtataggtgcatgcctttaaccacagtactggtggatatctgagttcaacaccagcctgggactatagagtgagttacaggacaacccaggctacatggaggaaaccatgacttcaaaaactaaaaataaataaataataggtaggtagatagatagatagatagatacatacatacatagatacatagatacatagatacatagatacatagatacatagatacatagatacatagatacatagatacatagatagatgcatagatagatacatagatagatagagacatagatagatgcatagatagatacatagatagatagatgcatagatagatagatacatagatagaaagatgcatgtatacatacatgcatgcatacatagataaatagatgactcataaaaaattaaaagaataaaaaaataaacaaggccacagcagagcatctacatttgagaggataattaataattgatagaggaagcatctgtactccatattgctccagcctaaaatgagttgtcccacgttgtgtgtagggacaccagggttttaagagggttaggagcctttcctaatgatccctcatgctccagtatagcagccccttctccttttttttttctttttttctttattaacttgagtatttcttattaacatttcgagtgttattccctttcccggtttccaggccaacatccccctaatccctccccctccccttctttatgggtgttcccctccccaccctccccccattgccgcgctccccccaacaatcacattcacagggggttcagtcttagcaggaccaaggacttccccttccattggtgctcttactaggctattcattgctacctatgaggttggagtccagggtcagtccatgtatagtctttaggtagtggcttagtccctggaagctctggttggttggcattgttgttcatatggggtttcgagtcccttcaagctcttccagttctttctctgattccttcaacgggggtcctattctcccacccttcccccactgccgccctccccccaacaatcacgttcactggggctgaaccccatttttaatagggttatttgtctccctgcggtctaacttcttgagttctttgtatattttggatataagccctctatctgttgtaggattggtaaagatcttttcccaatctgttggttgccgttttgtcctaaccacagtgtctttgccttacagaagctttgcagttttatgagatcccatttgtcgattcttgatcttagagcataagccattggtgttttgttcaggaaattttctccagtgcccatgtgttcaagatgcttccccactttttttcctattagtttgagtgtatctggtttgatgtggaggtccttgatccacttggacttaagctttgtacagcgtgataagcatggatcaatctgcattcttctacatgttgacctccagttgaaccagcaccatttgctgaaaatgctatcttttttccattgaatggttttggcccctttgtcaaaaatcaagtgaccataggtaggtgggttcatttctgagtcttcaattctattccattgatctatctgtctgtctctgtaccaataccatgcagtttttatcactattgctctgtaatactgcttgagttcagggatagtgattccccctgaagtccttttattgttgaggatagttttagctatcctgggttttttgttattctagatgaatttgcaaattgttctgtctaactctttgaagaattggattggtattttgatggggattgcattgaatctgtagatcgcttttggtaaaatggtcatttttactagattaatcctgccaatccatgaacatgggagatctttccatcttctgaggtcttcttcaatttctttcttcagcgtcttgaagttcttattgtacagatcttttacttgcctggttaaagtcacaccaaggtattttatattatttgggactattatgaagggtatcgtttccctaatttctttctcggcttgtttctcttttgtgtagaggaaggcaactgatttatttgagttaattttatacccagccactttgctgaagttgtttatcagctttagtagttctctggtggaacttttgggatcacttaaatacactatcatgtcatctgcaaatagtgatattttgacttcttcttttccaatctttatccccttgatctccttttgttgtctgattgctctggcttgaacttcaagaactatattgaataagtagggagagagtgcagccccttctctttaagagaacacagctttgcacttggcactgaggcaaggcagcggtgagagcttccttcccaactgtgctccttccctctctcctcttcagggaagcgattctgcttgggagatggcctggctaagatggagctcttcctgctgctcaccactattttacagaacttccgtttcaagttcccaatgaaactagaagacatcaacgagtcccccaaacccttggggtttaccaggatcataccaaagtacaccatgagcttcatgcccatctgattctgagttgaatcaaggtggggcaagagggagagagagcctgaagtggggccagggtgcaggtggagagaacaggggaggtgaagatgagggttaagaagggaccacacccatggaagaaacacaaaagacttctcactttggtaaaattgtaacagtcctaataaaaagaaagaaatactcagtgggcagcagtaacaacaactgagactcatggggcaaaggtggctcacctctgcagaagctgtcctgtccttctctcagtcctctacacaagagcagcatgtccccaagtccaacgtacaggttgcaaagatggaacttacaaatttgaacctaaactgaggtggaaaaaactcaagttagctaggattgatgttttggactctatcaccagcattcaggagggagggaacatggctctctaccatgtctgccaggactacacagtgagagcttatctcaaaagaaaaaagaaaaaaagaaaaaaatttatatatatatatatatatatgtatatatatgtatatatatatatggagagagagagagagagagagagagagagagagagagagagagagagagagagtttgcattgtacatgatcagggaaataataaaaactagtttgacagtcacataccagtgggttctaatttatcaaactccacccccacccccactgccactgctgccctatgaaggaactgaacagaagcttaactttccttgggccatttcgacagctgttgtgtcatcaaggcttctgttttcctatggagacactacacatgggacagagaggataacagggagctcatgactgagagaccttcaggccaaagcacttgaacctttgtttatcctgtttattctgaattttctgcttctgggctctcatttccccaccattaaaatgagaatatcaatatttacagctgcactgcatctctttttggagtgattcctggtaactaagaaataagtagaaaatggaaggatgaaatccaccaggaggtttgagtaaattccactgtgggaaacacaggggactgtgggatggcaaggatgagagctggaaagaatgcaaggccacactatgtctcatgcatattttatatcttttttatattctttatatctttgtagtgtttttattagcctacaaagaaatacatttctcactggcaacttcttacatatatatcactacctatgttctcattcactttccttcgctggtcttggcctcttcgcaaaattattcaccggtaatttattcacactttctaatttttgagcatggtgcattccagtaagatttaatctctgtggccatggtgtttcacagctctgtaacactgaagcacattcatcatcaactgcactgaagtcatcaacttaagaagcaaaggaggattcttctggtctccatctgcgcccagagctaagtctgccccacaaccctccagattcaaaacctccccagacagagctagtcctccaggagtgctctcactactaaggccacaagtgagaccccatttcccttcaataccgatccaaagaggagcccaccagataccaggtaccaaagttaaatgaggatccgttgacctgcaggtc

SEQ ID NO: 12868 - protein, 492 aa, Rattus norvegicus; identical to SEQ ID NO: 2400
  ref <308>: DATABASE ACCESSION NUMBER: SWISS-Prot / P11711
  ref <309>: DATABASE ENTRY DATE: 2002-06-15

SEQ ID NO: 12869 - DNA, 8778 bp, Homo sapiens; identical to SEQ ID NO: 2401
  ref <308>: DATABASE ACCESSION NUMBER: EMBL / U22028
  ref <309>: DATABASE ENTRY DATE: 2000-03-04

SEQ ID NO: 12870 - protein, 494 aa, Homo sapiens; identical to SEQ ID NO: 2402
  ref <308>: DATABASE ACCESSION NUMBER: SWISS-Prot / Q16696
  ref <309>: DATABASE ENTRY DATE: 2002-06-15

SEQ ID NO: 12871 - DNA, 1004 bp, Rattus norvegicus
  ref <308>: DATABASE ACCESSION NUMBER: EMBL / M34134
  ref <309>: DATABASE ENTRY DATE: 2000-03-04
cttagccgcagggggcgccggcgttgcaaagcgggcctgggcgggacgaaccggacctggctccgtaactgcaggagcccagcagtagcagctgcagagcgcggaggcagagcacagcctcagccgccgcctcgccatggcgggtagcagctcgctggaggcggtgcggagaaagatccggagcctgcaggaacaggcagatgccgcggaggagcgtgcgggcagcctgcagcgagagctggaccaggagcggaagctgcgggaaaccgctgaagctgacgtagcatctctgaacagacgcatccagctggttgaggaggagttggatcgcgctcaggagcgtctggccacagctctacagaagctggaggaggctgagaaggctgcagatgagagtgagagaggcatgaaagtcattgaaagccgagcccaaaaagatgaagaaaagatggagattcaggagatccagctgaaagaggccaagcacattgctgaagatgctgaccgaaagtatgaagaggtggcccgtaagctggtcatcatcgagagcgatctggagcgtgcggaggagagggctgagctctcggaaggcaaatgtgccgagcttgaagaagagttgaaaacggtgacgaacaacttgaagtcactggaggctcaggctgagaagtactctcagaaagaagacaagtatgaagaggagatcaaggttctctctgacaagctgaaggaggctgagacccgggctgagtttgcagagagatcagtaaccaaattggagaaaagcattgatgacttagaagataagtttctttgcttctctcctcccaagactccttcatcaagccggatgtcccacctctctgagctctgcatctgtctgctctccagctgacccaggtttctttctagtgcccacccaccctagggccaggcacagaccgtgctttctattgtacagaggtgatcctcccagtgtaaaataaacactgtacgctagtcctgtt

SEQ ID NO: 12872 - protein, 284 aa, Rattus norvegicus; identical to SEQ ID NO: 3319
  ref <308>: DATABASE ACCESSION NUMBER: SWISS-Prot / P18342
  ref <309>: DATABASE ENTRY DATE: 2002-06-15

SEQ ID NO: 12873 - DNA, 1111 bp, Homo sapiens
  ref <308>: DATABASE ACCESSION NUMBER: EMBL / M19713
  ref <309>: DATABASE ENTRY DATE: 2000-03-04
ccgcgcgctcgccccgccgctcctgctgcagccccaggcccctcgccgccgccaccatggacgccatcaagaagaagatgcagatgctgaagctcgacaaggagaacgccttggatcgagctgagcaggcggaggccgacaagaaggcggcggaagacaggagcaagcagctggaagatgagctggtgtcactgcaaaagaaactcaagggcaccgaagatgaactggacaaatactctgaggctctcaaagatgcccaggagaagctggagctggcagagaaaaaggccaccgatgctgaagccgacgtagcttctctgaacagacgcatccagctggttgaggaagagttggatcgtgcccaggagcgtctggcaacagctttgcagaagctggaggaagctgagaaggcagcagatgagagtgagagaggcatgaaagtcattgagagtcgagcccaaaaagatgaagaaaaaatggaaattcaggagatccaactgaaagaggccaagcacattgctgaagatgccgaccgcaaatacgaagaggtggcccgtaagctggtcatcattgagagcgacctggaacgtgcagaggagcgggctgagctctcagaaggcaaatgtgccgagcttgaagaagaattgaaaactgtgacgaacaacttgaagtcactggaggctcaggctgagaagtactcgcagaaggaagacagatatgaggaagagatcaaggtcctttccgacaagctgaaggaggctgagactcgggctgagtttgcggagaggtcagtaactaaattggagaaaagcattgatgacttagaagacgagctgtacgctcagaaactgaagtacaaagccatcagcgaggagctggaccacgctctcaacgatatgacttccatataagtttctttgcttcacttctcccaagactccctcgtcgagctggatgtcccacctctctgagctctgcatttgtctattctccagctgaccctggttctctctcttagcatcctgccttagagccaggcacacactgtgctttctattgtacagaagctcttcgtttcagtgtcaaataaacactgtgtaagctaaaaaaa

SEQ ID NO: 12874 - protein, 284 aa, Homo sapiens; identical to SEQ ID NO: 3321
  ref <308>: DATABASE ACCESSION NUMBER: SWISS-Prot / P09493
  ref <309>: DATABASE ENTRY DATE: 2002-06-15

SEQ ID NO: 12875 - DNA, 1415 bp, Rattus norvegicus
  ref <308>: DATABASE ACCESSION NUMBER: EMBL / M34238
  ref <309>: DATABASE ENTRY DATE: 2000-03-04
cagcggcagtggcggcggcgcggcggctggagcctctgattgggtttcggggtccggtactggagccaatcagcgcgggcagcgaaccgggggagcgaggcacggagtccctacctggcagctgcctgggatctgtagagtgaagcttcaggacacaacgtggccgggccatggagcagtatacagcaaatagcaatagttccacagagcagatcgtggtgcaggctggccagattcagcagcagcagcagggtggtgtcactgctgtccagctgcagactgaggcccaggtggcatccgcctcaggccagcaagtccagaccctccaggtagttcaggggcagccattaatggtgcaagtcagtggaggccagctgattacatcaactggccaacccatcatggtacaggctgtgcctggtggacaaggccaaactatcatgcaagtacctgtgtctggaacacaaggtttacagcagatacagttggtaccccctggacagatccagatccagggcgggcaggctgtgcaggtgcaaggccagcagggacagacccagcagatcatcattcagcagccacagaccgcggtcaccgctggccagactcagacacaacaacagattgctgtccagggacagcaagtggcccagactgctgaagggcagactattgtctaccagccagttaatgcagatggcacaatcctccagcaaggcatgatcaccatcccagcagccagtttggcaggggcacagatcgttcagacaggagccaataccaacacaaccagtagtggacaagggactgtcactgtgacactgccagtggcagggaatgtggtcaactcaggaggaatggtcatgatggtaccaggggctggctctgtgcctgctatccaaagaatccctttacctggggcagagatgctggaagaagagccgttgtatgtgaatgccaaacagtatcaccgcatccttaagaggagacaagcgagggccaagctagaggcagaagggaagatcccaaaggaaagaaggaaatacctccatgagtctcggcaccgacacgccatggcacggaagcgtggggaagggggccgcttcttctctccaaaagaaaaggacagtcctcacatgcaggatccaaaccaagctgatgaagaagccatgacacagatcatccgagtttcctaaccacaggagggtggcagagcggatgagtcacagtcctctccactgttcctggaaatggactgacttccagttgggcactgacagtctcactctgccctttctcaggacagaaactacttagctcagtattacagctgcagtgatggctgacaaactgaagaggcaagcttttgtctctccctttcattgaggacctgttcagactgttggtgacattga

SEQ ID NO: 12876 - protein, 341 aa, Rattus norvegicus
  ref <308>: DATABASE ACCESSION NUMBER: SWISS-Prot / AAA40889
  ref <309>: DATABASE ENTRY DATE: 2002-06-15
MEQYTANSNSSTEQIVVQAGQIQQQQQGGVTAVQLQTEAQVASASGQQVQTLQVVQGQPLMVQVSGGQLITSTGQPIMVQAVPGGQGQTIMQVPVSGTQGLQQIQLVPPGQIQIQGGQAVQVQGQQGQTQQIIIQQPQTAVTAGQTQTQQQIAVQGQQVAQTAEGQTIVYQPVNADGTILQQGMITIPAASLAGAQIVQTGANTNTTSSGQGTVTVTLPVAGNVVNSGGMVMMVPGAGSVPAIQRIPLPGAEMLEEEPLYVNAKQYHRILKRRQARAKLEAEGKIPKERRKYLHESRHRHAMARKRGEGGRFFSPKEKDSPHMQDPNQADEEAMTQIIRVS

SEQ ID NO: 12877 - DNA, 1758 bp, Homo sapiens
  ref <308>: DATABASE ACCESSION NUMBER: Refseq / NM_002505
  ref <309>: DATABASE ENTRY DATE: 2002-11-05
acggaattcccggcagtggcggcggcagcggcggctggagcctcctgattgggtttcggagtccggtactggagccaatcagcgcgggcagcgaaccgggggagcgaggcacggagtgtacctcacagccttctaggatctccagagtggacaggaatctcacttggagggaccatggagcagtatacagcaaacagcaatagttcgacagagcagattgttgtccaggcaggacagattcagcagcagcagcagggtggtgtcactgctgtgcagttgcagactgaggcccaggtggcatccgcctcaggccagcaagtccagaccctccaggtagtccaagggcagccattaatggtgcaggtcagtggaggccagctaatcacatcaactggccaacccatcatggtccaggctgtccctggtggacaaggtcaaaccatcatgcaagtacctgtttctggaacacagggtttgcagcaaatacagttggtcccacctggacagatccagatccagggtggacaggctgtgcaggtgcagggccagcagggccagacccagcagatcatcatccagcagccccagacggctgtcactgctggccagactcagacacagcagcagattgctgtccagggacagcaagtggcacagactgctgaagggcagaccatcgtctatcaaccagttaatgcagatggcaccattctccagcaagttacagtccctgtttcaggcatgatcactatcccagcagccagtttggcaggagcacagattgttcaaacaggagccaataccaacacaaccagcagtgggcaagggactgtcactgtgacactaccagtggcaggcaatgtggtcaattcaggagggatggtcatgatggttcctggggctggctctgtgcctgctatccaaagaatccctctacctggagcagagatgcttgaagaagagcctctctacgtgaatgccaaacaataccaccgtattcttaagaggaggcaagcccgagctaaactagaggcagaagggaaaattccaaaggagagaaggaaatacctgcatgagtctcggcaccgtcatgccatggcacggaagcgtggtgaaggtggacgatttttctctccaaaggaaaaggatagtccccatatgcaggatccaaaccaagccgatgaagaagcaatgacacagatcatccgagtgtcctaaccccacgccatgtgatggagctgatcaaggtcatgtttctcactgttccaggaaattgatcaactcttccaatgggacattgatgatcacattctgccctttactacaggacagaaaccacttagtttttaataagtggctcagtattacaattgcagcgatgcctggcaaattgaagttgcaagcctttgtcttactctttcagtcaggacctatttcagactgttgatgacattgacatttcatggattcggatgatgcaaggagacacatgccaccccagcagtacacaaagcacttaccttgactggtgaagtcagccagccatctcagcagggaagaacaaccttctcaaccaaaactgcaatcaggaaagcagcagcccactccttcccatggaatctagatagcatttatccctctggtgggggaatctcacactgactaactgaatggacgctttgtattcagagatggcttccaggcaaggaagttctatcttgtgatacggaaacaataaattcctgagatacattcttc

SEQ ID NO: 12878 - protein, 347 aa, Homo sapiens
  ref <308>: DATABASE ACCESSION NUMBER: Refseq / NP_002496
  ref <309>: DATABASE ENTRY DATE: 2002-11-05
MEQYTANSNSSTEQIVVQAGQIQQQQQGGVTAVQLQTEAQVASASGQQVQTLQVVQGQPLMVQVSGGQLITSTGQPIMVQAVPGGQGQTIMQVPVSGTQGLQQIQLVPPGQIQIQGGQAVQVQGQQGQTQQIIIQQPQTAVTAGQTQTQQQIAVQGQQVAQTAEGQTIVYQPVNADGTILQQVTVPVSGMITIPAASLAGAQIVQTGANTNTTSSGQGTVTVTLPVAGNVVNSGGMVMMVPGAGSVPAIQRIPLPGAEMLEEEPLYVNAKQYHRILKRRQARAKLEAEGKIPKERRKYLHESRHRHAMARKRGEGGRFFSPKEKDSPHMQDPNQADEEAMTQIIRVS

SEQ ID NO: 12879 - DNA, 1595 bp, Rattus norvegicus; identical to SEQ ID NO: 3672
  ref <308>: DATABASE ACCESSION NUMBER: EMBL / M35270
  ref <309>: DATABASE ENTRY DATE: 2001-03-25

SEQ ID NO: 12880 - protein, 414 aa, Rattus norvegicus; identical to SEQ ID NO: 3673
  ref <308>: DATABASE ACCESSION NUMBER: SWISS-Prot / AAA42169
  ref <309>: DATABASE ENTRY DATE: 2001-10-16

SEQ ID NO: 12881 - DNA, 1600 bp, Homo sapiens; identical to SEQ ID NO: 3674
  ref <308>: DATABASE ACCESSION NUMBER: Refseq / NM_000030
  ref <309>: DATABASE ENTRY DATE: 2002-11-05

SEQ ID NO: 12882 - protein, 392 aa, Homo sapiens; identical to SEQ ID NO: 3675
  ref <308>: DATABASE ACCESSION NUMBER: Refseq / NP_000021
  ref <309>: DATABASE ENTRY DATE: 2002-11-05

SEQ ID NO: 12883 - DNA, 1595 bp, Rattus norvegicus; identical to SEQ ID NO: 3672
  ref <308>: DATABASE ACCESSION NUMBER: EMBL / M35270
  ref <309>: DATABASE ENTRY DATE: 2001-03-25

SEQ ID NO: 12884 - protein, 414 aa, Rattus norvegicus; identical to SEQ ID NO: 3673
  ref <308>: DATABASE ACCESSION NUMBER: SWISS-Prot / AAA42169
  ref <309>: DATABASE ENTRY DATE: 2001-10-16

SEQ ID NO: 12885 - DNA, 1600 bp, Homo sapiens; identical to SEQ ID NO: 3674
  ref <308>: DATABASE ACCESSION NUMBER: Refseq / NM_000030
  ref <309>: DATABASE ENTRY DATE: 2002-11-05

SEQ ID NO: 12886 - protein, 392 aa, Homo sapiens; identical to SEQ ID NO: 3675
  ref <308>: DATABASE ACCESSION NUMBER: Refseq / NP_000021
  ref <309>: DATABASE ENTRY DATE: 2002-11-05

SEQ ID NO: 12887 - DNA, 562 bp, Rattus norvegicus; identical to SEQ ID NO: 3680
  ref <308>: DATABASE ACCESSION NUMBER: EMBL / M36151
  ref <309>: DATABASE ENTRY DATE: 2000-03-04

SEQ ID NO: 12888 - protein, 187 aa, Rattus norvegicus; identical to SEQ ID NO: 3681
  ref <308>: DATABASE ACCESSION NUMBER: SWISS-Prot / AAA41612
  ref <309>: DATABASE ENTRY DATE: 2003-02-01

SEQ ID NO: 12889 - DNA, 1171 bp, Homo sapiens; identical to SEQ ID NO: 3682
  ref <308>: DATABASE ACCESSION NUMBER: EMBL / M81141
  ref <309>: DATABASE ENTRY DATE: 2000-03-04

SEQ ID NO: 12890 - protein, 261 aa, Homo sapiens [sequence omitted]

SEQ ID NO: 12891 - DNA, 1543 bp, Rattus norvegicus
  ref <308>: DATABASE ACCESSION NUMBER: EMBL / M37482
  ref <309>: DATABASE ENTRY DATE: 2000-03-04
ctctgacctcatgagacaagagccggctggcaaaacagaagggacccgaaagagaatttgctgaagaggagaaggaaaaaagtccaaaaaacctgtacgtgaggggtggggaggaaaagcagggcctttaaagaaggcaaccacacgacttttgctgccaggatgcccttgctttggctgagaggatttctgttggcaagttgctggattatagtgaggagttcccccaccccaggatccgaggggcacggcgcagccccggactgcccgtcctgtgcgctggccacccttccgaaggatggacctaactctcagccagagatggtagaggctgtcaagaagcacatcttaaacatgctgcacttgaagaagagacccgatgtcacccagccggtacccaaggcggcgcttctcaacgcgatcagaaagcttcatgtgggtaaagtgggggaaaacgggtatgtggagatagaggacgacattggcaggagggccgaaatgaatgaactcatggagcagacctcggagatcatcacctttgccgagtcaggcacagccaggaagacactgcattttgagatttccaaggaaggcagtgacctgtcagtcgtggagcgtgcagaagtctggctcttcctgaaagtccccaaggccaacaggaccaggaccaaagtcaccatccgtctgtttcagcagcagaagcatccacagggcagcttggacatgggggatgaggccgaggaaatgggcttgaagggggagaggagtgaactgttgctatcagagaaagtggtagatgctcggaagagcacttggcacatcttcccagtgtctagcagcatccagcgcctgctggaccaggggaagagttccctggatgtgcggattgcttgtgaacagtgccaggagagcggtgccagcctagtgctcctgggcaagaagaagaagaaagaggtggatggagacgggaagaagaaagacggaagtgacggagggctggaagaggaaaaagaacagtcacacagacctttcctcatgctgcaggctaggcagtctgaagaccatcctcaccgcaggcgtaggcggggcttggagtgtgatggcaaggtcaacatttgctgtaagaaacagttctttgtcagcttcaaggatattggctggaatgactggatcattgctccctctggctatcatgccaactattgtgagggtgagtgcccaagccacatagcaggcacctctgggtcctcactctccttccactcaacagtcattaaccactaccgcatgaggggtcacagcccctttgccaaccttaagtcatgctgtgtgcccaccaagctgagacccatgtccatgctgtattatgatgatggtcaaaacattatcaaaaaggacattcagaacatgattgtggaggagtgtggctgctcctagagttgccaggtcccagagcaaatggatctagggtgtccaggaaaagacagtggcaaatgaagaaaaatatataagatttctgcctaaacaagacaaccagaaaaat

SEQ ID NO: 12892 - protein, 424 aa, Rattus norvegicus
  ref <308>: DATABASE ACCESSION NUMBER: SWISS-Prot / AAA41436
  ref <309>: DATABASE ENTRY DATE: 2001-10-16
MPLLWLRGFLLASCWIIVRSSPTPGSEGHGAAPDCPSCALATLPKDGPNSQPEMVEAVKKHILNMLHLKKRPDVTQPVPKAALLNAIRKLHVGKVGENGYVEIEDDIGRRAEMNELMEQTSEIITFAESGTARKTLHFEISKEGSDLSVVERAEVWLFLKVPKANRTRTKVTIRLFQQQKHPQGSLDMGDEAEEMGLKGERSELLLSEKVVDARKSTWHIFPVSSSIQRLLDQGKSSLDVRIACEQCQESGASLVLLGKKKKKEVDGDGKKKDGSDGGLEEEKEQSHRPFLMLQARQSEDHPHRRRRRGLECDGKVNICCKKQFFVSFKDIGWNDWIIAPSGYHANYCEGECPSHIAGTSGSSLSFHSTVINHYRMRGHSPFANLKSCCVPTKLRPMSMLYYDDGQNIIKKDIQNMIVEECGCS

SEQ ID NO: 12893 - DNA, 1840 bp, Homo sapiens
  ref <308>: DATABASE ACCESSION NUMBER: Refseq / NM_002192
  ref <309>: DATABASE ENTRY DATE: 2000-10-31
tccacacacacaaaaaacctgcgcgtgaggggggaggaaaagcagggcctttaaaaaggcaatcacaacaacttttgctgccaggatgcccttgctttggctgagaggatttctgttggcaagttgctggattatagtgaggagttcccccaccccaggatccgaggggcacagcgcggcccccgactgtccgtcctgtgcgctggccgccctcccaaaggatgtacccaactctcagccagagatggtggaggccgtcaagaagcacattttaaacatgctgcacttgaagaagagacccgatgtcacccagccggtacccaaggcggcgcttctgaacgcgatcagaaagcttcatgtgggcaaagtcggggagaacgggtatgtggagatagaggatgacattggaaggagggcagaaatgaatgaacttatggagcagacctcggagatcatcacgtttgccgagtcaggaacagccaggaagacgctgcacttcgagatttccaaggaaggcagtgacctgtcagtggtggagcgtgcagaagtctggctcttcctaaaagtccccaaggccaacaggaccaggaccaaagtcaccatccgcctcttccagcagcagaagcacccgcagggcagcttggacacaggggaagaggccgaggaagtgggcttaaagggggagaggagtgaactgttgctctctgaaaaagtagtagacgctcggaagagcacctggcatgtcttccctgtctccagcagcatccagcggttgctggaccagggcaagagctccctggacgttcggattgcctgtgagcagtgccaggagagtggcgccagcttggttctcctgggcaagaagaagaagaaagaagaggagggggaagggaaaaagaagggcggaggtgaaggtggggcaggagcagatgaggaaaaggagcagtcgcacagacctttcctcatgctgcaggcccggcagtctgaagaccaccctcatcgccggcgtcggcggggcttggagtgtgatggcaaggtcaacatctgctgtaagaaacagttctttgtcagtttcaaggacatcggctggaatgactggatcattgctccctctggctatcatgccaactactgcgagggtgagtgcccgagccatatagcaggcacgtccgggtcctcactgtccttccactcaacagtcatcaaccactaccgcatgcggggccatagcccctttgccaacctcaaatcgtgctgtgtgcccaccaagctgagacccatgtccatgttgtactatgatgatggtcaaaacatcatcaaaaaggacattcagaacatgatcgtggaggagtgtgggtgctcatagagttgcccagcccagggggaaagggagcaagagttgtccagagaagacagtggcaaaatgaagaaatttttaaggtttctgagttaaccagaaaaatagaaattaaaaacaaaacaaaacaaaaaaaaaaacaaaaaaaaacaaaagtaaattaaaaacaaacctgatgaaacagatgaaacagatgaaggaagatgtggaaatcttagcctgccttagccagggctcagagatgaagcagtgaagagacagattgggagggaaagggagaatggtgtaccctttatttcttctgaaatcacactgatgacatcagttgtttaaacggggtattgtcctttccccccttgaggttcccttgtgagcttgaatcaaccaatctgatctgcagtagtgtggactagaacaacccaaatagcatctagaaagccatgagtttgaaagggcccatcacaggcactttcctagcctaat

SEQ ID NO: 12894 - protein, 426 aa, Homo sapiens
  ref <308>: DATABASE ACCESSION NUMBER: Refseq / NP_002183
  ref <309>: DATABASE ENTRY DATE: 2000-10-31
MPLLWLRGFLLASCWIIVRSSPTPGSEGHSAAPDCPSCALAALPKDVPNSQPEMVEAVKKHILNMLHLKKRPDVTQPVPKAALLNAIRKLHVGKVGENGYVEIEDDIGRRAEMNELMEQTSEIITFAESGTARKTLHFEISKEGSDLSVVERAEVWLFLKVPKANRTRTKVTIRLFQQQKHPQGSLDTGEEAEEVGLKGERSELLLSEKVVDARKSTWHVFPVSSSIQRLLDQGKSSLDVRIACEQCQESGASLVLLGKKKKKEEEGEGKKKGGGEGGAGADEEKEQSHRPFLMLQARQSEDHPHRRRRRGLECDGKVNICCKKQFFVSFKDIGWNDWIIAPSGYHANYCEGECPSHIAGTSGSSLSFHSTVINHYRMRGHSPFANLKSCCVPTKLRPMSMLYYDDGQNIIKKDIQNMIVEECGCS

SEQ ID NO: 12895 - DNA, 2776 bp, Rattus norvegicus
  ref <308>: DATABASE ACCESSION NUMBER: EMBL / M57672
  ref <309>: DATABASE ENTRY DATE: 2000-03-04
agctttcagctgcccttctaggatgctgggcacactttagctgacctcttgcccctctgggattaggtaagcacatgggtcctacattgctaccaccccttccctactcctaccctgaggcgatgcttgactccagatcctgatgccaagtgggggctgggggcactgagccagtctgcaagggtgacaggtatggctgtggctgcttctcgggggacaaccagctctgtggccaggacttcctcggcggacctatattcctctccccatcccagaactgtcctgagaggaaaaggggtctctctcctgggtccccaccccctccagggcctctgggaaacccaccagagttacagaaagggaggggcctgggcttgagaaccagtgcctcagtttccctctcaactccgatctgtgtgtagccaaggcttctggccccgtacgttcttttagtgaatctttgagagaacttggaggtggaggggtgggaaatggaagcccaggcttccagcagggcgtcttccgcttggactgaaacatctgcttgcaggaggcagggccaaccctccccgtcccaggaggaagggacaggggtcaggggtcagagctacccacttcccaggctctttggaagatggagccccgctgggtgcctttgggggctgttgggtggacagagggataagtgggcagacaaggaaaggagaaacgtgcaccatggaagtcacagatggttcacctcagcgccctgagaccccccgagaccacttttagtttacacccacaaacctaaaagaaacgaagcccaagagtccccaaacgggccagagctgcacggagccatgggtaagagcagtgaccacgcccactccctgccctcctacatggacgggagtgttctgtaccaaggatgaatgaacaacactggtactggcctggcccctaggacccctggaaactctcagtgtgactttctcaccagaaatcccagaccccccgacctaggtccaccccagggcccagggtacgggtgtcagctctaaagaagggtacgaactgtcccttggacaacaaggacggggcttggttgccactatggataggagggacccagcagctgccttctggaggaccaaactgttcaggggaaggacaggaagaaatgagcctgtgccttcaggtcagagtcatgcctagatctgggcagggagagctacaagggatactgaccaggagatagggtgttgtcccctccgccctggggtttggtatcctcctctgccttaagagttgcaaatcgactttcccacataagaggcaccaaatccagttaggacacccaccaaccccaccttccaatccaggggagaggaatgtcagcaatgcgtgggcgtgtccttctaatgtgttttccttgagtgtttgtatgtggaccatctgcatgcctggtacccagaggccatcaggtctcttggaacaggaattgttgatgtgaaatgccatgtggttgctgggaatggaactcaggacctccggaagaaccttctcttctccagtccccctctgttgtttttttttttttttttttgagatacgatctcacactgtagcacaggctaatccagaactcactaggtaggtcagactgggctcaaatccacagcgattctgcttctgcttcctgagtgccagggtttgcaggtgttagctatcatgcccagtcttaacatttcacacacgccagtccaagttattaaaaaacaacccggcaggttgagggcagggccccctcaaagtcccacaactggtgcgtgcgtaccaagtccaatgtcgggaaaggcctggacccttgaacccttttgttcggttcacttgttgctcttactaccaaatcctgggcttacacatgaatgccagcccctccctgcccagttctgtgacccccttccccgggcagctcttgggagaagtcatgcatacatggaggcggctggcagcctctttgactccagagttcagcgggagacagagggagctcatcacatcaggcaccccagaagagttctgggcctgcttcacgtttaactttgtgattttcaggagtaccagcctgctctaacggtttcagggaagattggctgtgggtttccgcagagtgtgggggagttcctgcttatccatacagctgattttcaagaaccacctccccaagaaaggtttgggggctcctactggacggtaagtcttgacctaggcagctagtcattagcagttagtcactcctccttggaaggcatgatagatgtccaaccccaagctactccaggagttcaagggcagggccaggctctctgctagagtcaggcacacagaaggataagtgcgaagcctatcttccctagggtttttctcaggacagtggtggcttggcttcttctgtatgcaggtacctagggcatgtgaagcctgaggggtctccttgggagggtctgctgggaacgaacagggatgaaccttgaagataaacaggattcgtaatgacggagataggctccagagcttctggtagaagcaacgccctggccaaagatctggaggctggacagcccacacatttctgggaggctaaaaggaggcccagaactatgtcccggaggcttgactttagactgcgcccagtggggtgtggggtggtctggagttctcaaggctggaccttaccctactctttctcactgggcaacagagccatgaagaatcggtttctggtgctggc

SEQ ID NO: 12896 - protein, 568 aa, Rattus norvegicus; identical to SEQ ID NO: 8912
  ref <308>: DATABASE ACCESSION NUMBER: SWISS-Prot / AAA57295
  ref <309>: DATABASE ENTRY DATE: 2002-06-15

SEQ ID NO: 12897 - DNA, 2244 bp, Homo sapiens
  ref <308>: DATABASE ACCESSION NUMBER: EMBL / X60069
  ref <309>: DATABASE ENTRY DATE: 1993-11-16
cggggcaagtgaggtgctgccgtcatccaggctggacagttcagtgatttgcctgaggccccacagcagagttcaactggagacagagaaaccagctagaggcagagggaggtaacacggagtcccccagaaaggtctgggctgcgcgtgcttcaggtaacctcccttgaccttcaggagaacgagaaggctgcctgatcagagagtccctgaagaagattctgtggctacaggcttcagcagagtgtgagggagaccccggttatttcctcagctatttccaccaaatcctcctgtctttcgtggccaacaccccaggcaaggcttggggcccccgtctgctgctggacgcagagccatgaagaagaagttagtggtgctgggcctgctggccgtggtcctggtgctggtcattgtcggcctctgtctctggctgccctcagcctccaaggaacctgacaaccatgtgtacaccagggctgccgtggccgcggatgccaagcagtgctcgaagattgggagggatgcactgcgggacggtggctctgcggtggatgcagccattgcagccctgttgtgtgtggggctcatgaatgcccacagcatgggcatcgggggtggcctcttcctcaccatctacaacagcaccacacgaaaagctgaggtcatcaacgcccgcgaggtggcccccaggctggcctttgccaccatgttcaacagctcggagcagtcccagaagggggggctgtcggtggcggtgcctggggagatccgaggctatgagctggcacaccagcggcatgggcggctgccctgggctcgcctcttccagcccagcatccagctggcccgccagggcttccccgtgggcaagggcttggcggcagccctggaaaacaagcggaccgtcatcgagcagcagcctgtcttgtgtgaggtgttctgccgggatagaaaggtgcttcgggagggggagagactgaccctgccgcagctggctgacacctacgagacgctggccatcgagggtgcccaggccttctacaacggcagcctcacggcccagattgtgaaggacatccaggcggccgggggcattgtgacagctgaggacctgaacaactaccgtgctgagctgatcgagcacccgctgaacatcagcctgggagacgcggtgctgtacatgcccagtgcgccgctcagcgggcccgtgctggccctcatcctcaacatcctcaaagggtacaacttctcccgggagagcgtggagagccccgagcagaagggcctgacgtaccaccgcatcgtagaggctttccggtttgcctacgccaagaggaccctgcttggggaccccaagtttgtggatgtgactgaggtggtccgcaacatgacctccgagttcttcgctgcccagctccgggcccagatctctgacgacaccactcacccgatctcctactacaagcccgagttctacacgccggatgacgggggcactgctcacctgtctgtcgtcgcagaggacggcagtgctgtgtccgccaccagcaccatcaacctctactttggctccaaggtccgctccccggtcagcgggatcctgttcaataatgaaatggacgacttcagctctcccagcatcaccaacgagtttggggtacccccctcacctgccaatttcatccagccagggaagcagccgctctcgtccatgtgcccgacgatcatggtgggccaggacggccaggtccggatggtggtgggagctgctgggggcacacagatcaccacggccactgcactggccatcatctacaacctctggttcggctatgacgtgaagcgggccgtggaggagccccggctgcacaaccagcttctgcccaacgtcacgacagtggagagaaacattgaccaggcagtgactgcagccctggagacccggcaccatcacacccagatcgcgtccaccttcatcgctgtggtgcaagccatcgtccgcacggctggtggctgggcagctgcctcggactccaggaaaggcggggagcctgccggctactgagtgctccaggaggacaaggctgacaagcaatccagggacaagatactcaccaggaccaggaaggggactctgggggaccggcttcccctgtgagcagcagagcagcacaataaatgaggccactgtgccaggtgcctccctggcctgtctccccacaaaaaaaaaaaaaaaaaaaa

SEQ ID NO: 12898 - protein, 569 aa, Homo sapiens
  ref <308>: DATABASE ACCESSION NUMBER: SWISS-Prot / P19440
  ref <309>: DATABASE ENTRY DATE: 2002-06-15
MKKKLVVLGLLAVVLVLVIVGLCLWLPSASKEPDNHVYTRAAVAADAKQCSKIGRDALRDGGSAVDAAIAALLCVGLMNAHSMGIGGGLFLTIYNSTTRKAEVINAREVAPRLAFATMFNSSEQSQKGGLSVAVPGEIRGYELAHQRHGRLPWARLFQPSIQLARQGFPVGKGLAAALENKRTVIEQQPVLCEVFCRDRKVLREGERLTLPQLADTYETLAIEGAQAFYNGSLTAQIVKDIQAAGGIVTAEDLNNYRAELIEHPLNISLGDAVLYMPSAPLSGPVLALILNILKGYNFSRESVESPEQKGLTYHRIVEAFRFAYAKRTLLGDPKFVDVTEVVRNMTSEFFAAQLRAQISDDTTHPISYYKPEFYTPDDGGTAHLSVVAEDGSAVSATSTINLYFGSKVRSPVSGILFNNEMDDFSSPSITNEFGVPPSPANFIQPGKQPLSSMCPTIMVGQDGQVRMVVGAAGGTQITTATALAIIYNLWFGYDVKRAVEEPRLHNQLLPNVTTVERNIDQAVTAALETRHHHTQIASTFIAVVQAIVRTAGGWAAASDSRKGGEPAGY

SEQ ID NO: 12899 - DNA, 1836 bp, Rattus norvegicus
  ref <308>: DATABASE ACCESSION NUMBER: EMBL / M58287
  ref <309>: DATABASE ENTRY DATE: 2000-03-04
agagactatcctgatttggcaaaagaagcaggccagaaggcattggcggaccggcagatcccttactccgcagtggagcaggcgtgcgttggctatgtgtacggtgaatccacctgcgggcagagggccatctatcacagcctggggctgactggcatccctatcattaatgtcaacaataactgctctaccggttctactgctttgtttatggcccagcaactggttcagggaggtttagcaaattgcgtgttagctcttgggtttgagaagatggaaaagggatcccttggtaccaaatattcagatcggtcaaatccactggaaaaacatattgacgtcttgatcaataagtatggaatgtctgcctgtccatttgctcctcagctgtttgggagcgctgggaaagaacatatggaaacatatggaacaaaggttgaacactttgcaaaaattggatggaaaaatcataaacactcagttaataacccgtattcccagttccaagatgaatacagcttagatgagataatgaaatcaaggccagttttcgattttctgactgtcttacaatgctgtcccacctcagatggtgccgcagcagcaattgtgtctagtgaggagtttgtgcagaagcatggcctgcagtccaaagctgtggaaattgtggcacaggagatggtgactgacatgcccagtacatttgaagaaaaaagtgttattaaaatggttggctatgatatgagtaaagaagctgccaggaagtgctatgagaagtccggcctgggtcccagtgatgtcgacgtgatagagcttcacgattgcttctctaccaatgaactcctgacttatgaagcactggggctctgtccagaaggacaaggtggagcactggtggacagaggggacaacacttacggaggaaagtgggtcataaaccctagtggaggcctcatctccaagggacacccactgggtgccacaggtctggctcagtgcgcggagctctgctggcagctgagaggcgaagccggaaagaggcaggttcctggggcaaaggtggctctgcagcacaatttaggccttggaggagctgctgttgtcaccctctacagaatgggttttcccgaagctgccagctccttcagaacgcaccagatttcagctgctcccaccagctctgcaggggatggattcaaggcaaatctcatttttaaggaaatcgagaagaagcttgaagaggaaggggaagagttcgtgaagaaaatcggtggcatttttgccttcaaagtgaaggatggccccgggggcaaagaagctacgtgggtggtggacgtgaagaacggcaaaggatcggtgcttccggattcagataagaaggctgactgcacaatcaccatggctgactcagacttgctggctttgatgactggtaaaatgaaccctcagtcggccttctttcaaggtaaactgaaaattgccggtaacatgggcctggccatgaaactgcaaagcctgcagcttcagccggacaaagctaagctgtgaagagtccctttggcaacctcaggacatcaagatgagatgtgtggatacgtagaaatccacgtctccctgtcaggacttagactgacacttcctgaatagcatgagatagatttcttgctaggtggctatggccaattgtatttcccccaagctgggggtgcaaagggcctcccaggctacactgctgctttgaggacttgcattctactgtgcttcatgaagctactatgttaatgatggtttggggtaaacttgagtttcagaataaagttcagaatagtaaaatct

SEQ ID NO: 12900 - protein, 547 aa, Rattus norvegicus
  ref <308>: DATABASE ACCESSION NUMBER: SWISS-Prot / AAA41726
  ref <309>: DATABASE ENTRY DATE: 2002-06-15
MPSVALNSPRLPRVFVVGVGMTKFMKPGGENSRDYPDLAKEAGQKALADRQIPYSAVEQACVGYVYGESTCGQRAIYHSLGLTGIPIINVNNNCSTGSTALFMAQQLVQGGLANCVLALGFEKMEKGSLGTKYSDRSNPLEKHIDVLINKYGMSACPFAPQLFGSAGKEHMETYGTKVEHFAKIGWKNHKHSVNNPYSQFQDEYSLDEIMKSRPVFDFLTVLQCCPTSDGAAAAIVSSEEFVQKHGLQSKAVEIVAQEMVTDMPSTFEEKSVIKMVGYDMSKEAARKCYEKSGLGPSDVDVIELHDCFSTNELLTYEALGLCPEGQGGALVDRGDNTYGGKWVINPSGGLISKGHPLGATGLAQCAELCWQLRGEAGKRQVPGAKVALQHNLGLGGAAVVTLYRMGFPEAASSFRTHQISAAPTSSAGDGFKANLIFKEIEKKLEEEGEEFVKKIGGIFAFKVKDGPGGKEATWVVDVKNGKGSVLPDSDKKADCTITMADSDLLALMTGKMNPQSAFFQGKLKIAGNMGLAMKLQSLQLQPDKAKL

SEQ ID NO: 12901 - DNA, 1164 bp, Rattus norvegicus
  ref <308>: DATABASE ACCESSION NUMBER: EMBL / M58495
  ref <309>: DATABASE ENTRY DATE: 2000-03-04
tggaggtcagatgaggatgctggatcccctgtagctgagttacaagtggttgtgggcagccccattaggtgctgggaactaaaaagggtcctctggaaaagcagtcagttactctaacagctcccccttccacttcctgacaaggccctacaagttctgtaggataactttaccatttttgttttgttttgggaaaggttcttaccatgtagccttaactatcctagaaattactacattgaccaggctagtcttcaactcacaagttccgtttgccggctcactcctgactgctgggattaaaggcatgggccaccatgccccacaaacataatttttatttaaggacatttaaaacctttttgtccagttctatattctgatgtaaatttcgtgtaaagttattaagttccacctgtggctacacaaatatttccctatggctgctgtctcccccgccagttttgctctggttcctggagggccacacagatgagttcgggggggggggggtggaggggtggggccacgacaccaaagctgaagagacccaagcgtgtacacccaagggccaccttttgcagtttctaagagcagaatcagaacgctgaaaagaagaaacgaattcactcacactagagacaagtctctcagagatttcagtctagagtcacagtgacttggcaaaatctgagccggtcctttagctgccccacccttccccttgcgtgcaaaggcgatttcccacatctgaccaaggactaacccacacaggcaggtcccacgaagctcgaaaattttctgttggaactttccattttgttcccagaagatcttggacagggagcagttgaatttacccaatatgtaaccatatcctcaaaacctctctcactctcaagctcccagaaacccttttgacttccatatacagaagtcctaggccagccctaaactgcttctccctgccaataacttggtatcctccccccagcgcctctgggctcggcaatccagccccgccctcgctggctgccctgcacagtgggctgggccggaaaagcaagatataaagcctgaaagtgctcagtacagctcgcactagcctaggctgtggcacgcaggatctttcctgaagcatttcagggtctgcctggcaaccag

SEQ ID NO: 12902 - protein, 273 aa, Rattus norvegicus; identical to SEQ ID NO: 10803
  ref <308>: DATABASE ACCESSION NUMBER: SWISS-Prot / AAA41989
  ref <309>: DATABASE ENTRY DATE: 2002-06-15

SEQ ID NO: 12903 - DNA, 2447 bp, Homo sapiens; identical to SEQ ID NO: 10804
  ref <308>: DATABASE ACCESSION NUMBER: Refseq / NM_000903
  ref <309>: DATABASE ENTRY DATE: 2002-11-05

SEQ ID NO: 12904 - protein, 274 aa, Homo sapiens; identical to SEQ ID NO: 10805
  ref <308>: DATABASE ACCESSION NUMBER: Refseq / NP_000894
  ref <309>: DATABASE ENTRY DATE: 2002-11-05

SEQ ID NO: 12905 - DNA, 1688 bp, Rattus norvegicus; identical to SEQ ID NO: 3772
  ref <308>: DATABASE ACCESSION NUMBER: EMBL / M61219
  ref <309>: DATABASE ENTRY DATE: 2000-03-04

SEQ ID NO: 12906 - protein, 272 aa, Rattus norvegicus; identical to SEQ ID NO: 3773
  ref <308>: DATABASE ACCESSION NUMBER: SWISS-Prot / AAA63500
  ref <309>: DATABASE ENTRY DATE: 1997-11-01

SEQ ID NO: 12907 - DNA, 1826 bp, Homo sapiens; identical to SEQ ID NO: 3774
  ref <308>: DATABASE ACCESSION NUMBER: Refseq / NM_002634
  ref <309>: DATABASE ENTRY DATE: 2000-10-31

SEQ ID NO: 12908 - protein, 272 aa, Homo sapiens; identical to SEQ ID NO: 3775
  ref <308>: DATABASE ACCESSION NUMBER: Refseq / NP_002625
  ref <309>: DATABASE ENTRY DATE: 2000-10-31

SEQ ID NO: 12909 - DNA, 923 bp, Rattus norvegicus; identical to SEQ ID NO: 3780
  ref <308>: DATABASE ACCESSION NUMBER: EMBL / M62388
  ref <309>: DATABASE ENTRY DATE: 2000-03-04

SEQ ID NO: 12910 - protein, 152 aa, Rattus norvegicus; identical to SEQ ID NO: 3781
  ref <308>: DATABASE ACCESSION NUMBER: SWISS-Prot / AAA21087
  ref <309>: DATABASE ENTRY DATE: 2002-06-15

SEQ ID NO: 12911 - DNA, 921 bp, Homo sapiens
  ref <308>: DATABASE ACCESSION NUMBER: EMBL / X53251
  ref <309>: DATABASE ENTRY DATE: 1992-12-30
tttttttttttcagactgaccgcggggcagctgcggacatgtcgaccccggcccggaggaggctcatgcgggatttcaagcggttacaagaggacccacctgtgggtgtcagtggcgcaccatctgaaaacaacatcatgcagtggaatgcagttatatttggaccagaagggacaccttttgaagatggtacttttaaactagtaatagaattttctgaagaatatccaaataaaccaccaactgttaggtttttatccaaaatgtttcatccaaatgtgtatgctgatggtagcatatgtttagatatccttcagaatcgatggagtccaacatatgatgtatcttctatcttaacatcaattcagtctctgctggatgaaccgaatcctaacagtccagccaatagccaggcagcacagctttatcaggaaaacaaacgagaatatgagaaaagagtttcggccattgttgaacaaagctggaatgattcataatagacaactggtctgttaatctttttcatcattgttgtgtataatttacctctcattagaaaggctaacaaattttaagtgccacaggttttaaggattctgcagaaaaaaaagaaaaaagtccttcagtttagaacctacaaaagcttgtgtatcttgattaatgtactttttattgcatggtgtgaactaagttattgctgcataaatttgtaatatatcctgtttgtatttttttccaagtgtataatgttggtgtggagttttcatgacagaatatacacattttgtaaatctgtacttttttcaaatattgaatgccttatttttgaattctttagatttttaaattggagaaaagcacttaaagttttttatatatgaatattacatgtaaagctgttaaaatacataacttcagtgc

SEQ ID NO: 12912 - protein, 152 aa, Homo sapiens; identical to SEQ ID NO: 3781
  ref <308>: DATABASE ACCESSION NUMBER: SWISS-Prot / CAA37339
  ref <309>: DATABASE ENTRY DATE: 2002-06-15

SEQ ID NO: 12913 - DNA, 923 bp, Rattus norvegicus; identical to SEQ ID NO: 3780
  ref <308>: DATABASE ACCESSION NUMBER: EMBL / M62388
  ref <309>: DATABASE ENTRY DATE: 2000-03-04

SEQ ID NO: 12914 - protein, 152 aa, Rattus norvegicus; identical to SEQ ID NO: 3781
  ref <308>: DATABASE ACCESSION NUMBER: SWISS-Prot / AAA21087
  ref <309>: DATABASE ENTRY DATE: 2002-06-15

SEQ ID NO: 12915 - DNA, 921 bp, Homo sapiens; identical to SEQ ID NO: 12911
  ref <308>: DATABASE ACCESSION NUMBER: EMBL / X53251
  ref <309>: DATABASE ENTRY DATE: 1992-12-30

SEQ ID NO: 12916 - protein, 152 aa, Homo sapiens; identical to SEQ ID NO: 3781
  ref <308>: DATABASE ACCESSION NUMBER: SWISS-Prot / CAA37339
  ref <309>: DATABASE ENTRY DATE: 2002-06-15

SEQ ID NO: 12917 - DNA, 2794 bp, Rattus norvegicus
  ref <308>: DATABASE ACCESSION NUMBER: EMBL / M63574
  ref <309>: DATABASE ENTRY DATE: 2001-07-17
aagctagtctgaaggggttgcgaaaaccccagcaatgtggagaagcctagggcttgccctggctctctgtctcctcccctatggaggagcagagagccaaggccaaagccctgcttgtaagcaagctccaccctggaacataggagatcaaaatccaatgctaaactccgagggcacagtgacagtggttgctcttcttcaagccagctgatacctgtgccttctgcaggcatccagattggaagacctgcgaataaaactagagaaccaaggatattttaacatctcctatattgttgttaatcatcaaggatctccttcccaattaaaacatgcacatcttaaaaagcaggtgtcagatcacattgctgtttacagacaagatgaacatcaaacagatgtctggacactcttaaatggaaacaaagatgacttcctcatatatgacagatgtggccgtcttgtgtatcaccttggtttgccctactccttcctcactttcccgtatgttgaagaagccatcaagatcgcttactgtgagaagaggtgtggaaactgctctttcacgagtcttgaagatgaagccttctgtaaaaacgtgtcctcggctactgcaagtaaaaccacagagccctcagaggagcataaccaccacaagcaccatgacaaacatgggcatgagcatcttgggagcagtaagccttcagagaatcagcaaccaggggcattagatgttgagacaagtcttcctccttcaggcttgcaccaccaccaccaccaccataagcacaagggccagcacaggcagggtcacttagagagctgagacatgggggcaagtgaaggcttgcaactttcacttgcccagaggaagctctgacgaaggggatgcataaaccagctcctgtgtaagttatctgaggagtctggggcagctaccagtagctgctgctgccactgccgacacctcatatttgagaagtcaggatctgcaatcacttgacagtgtgccgaaaacctcccatccttgtgtagctgacaggggcttttcgcggaggagaaagtcattgaatcctgtcaatgtagatcacctccagctgcctgacacagtcagcatgtaagccccacagaagccagccccaactgaagctgaaataataagaccaagaagtgaaaatgaaatttgaactaaatatttaaaataaagcgtactctccccaactccatctaaagacacaatttcatttctagaatgtttccaatccatttaattaattagtgaagtaaaagtagttgaaattggatttgtgcaaacatggagaaatctaccacattggcttctaaaatttaaaatttttatgccacaaaccatttcatccaaatcagatttgtaccgtggggcaactgaaaagtgattgcggccattggttaatatgtcttcctttttctttctccagtgttctagttacattgatgagaacagaaacataaactatgacctaggggtttctgttggatagctcgtaattaagaacggagaaagaacaacaaagacatattttccagttttttttctttacttaaaactttcaaaacaatagaaactttgtctttctaatcttatactttaaaccgattaaatctttaacagactacattttaaatatctacttatcttttttatctctaagactcctagtttgagtttcactacatatatctgtgaatcttgttttttcatctaatgctgtatcagtcttctgagttgtgagtgactgtcttgaaagagtaatggaagaaaagatggtgttaatctgcatagtgcttaagacagtatttccataatcaatgacggtttaatagagaaactgagtcctatgaacctgaactcctttatggctaatacaattaagcaagaatggagaatagaattgattggctacagtacagattatcaaaaataaatgcaacttaaaaagctggaaagtgtgtgtctttattgttcagctcacattgaaagtagaagtgcatctttagagccttaaagaaaactaggtaagttgttgctaatacactaagtgccctgctcaaaaccgcctccgagtgagggctgtctttggaggccgcgagctgctctaggtctcggatagtgttctggagacttgcaatttcttgttcttttcctcctgaagagctgaagcttctaaatgaagcagaaaaaaaactttgtcatagcaacttagaagtaaggttaagtataatgaactacaaagtagcaatcataacatttgtactttaaaaactatcctatggactggaaggcctgtagcttcatttttggtgtgctttaaagagaaagtctagtataaggctacaaaaataatttaatatacttaaaacaaatatggtttgccctggagttatcggtattttgatgctaatttcactgccccaaggacagctgcttagtcacatactcaggaatcagtgacttcaccagaaccttcttcccactgaatttgtaaaatacaggtgaggggcaggtataggatagaaggaggcctgtcattggaggagaaggaaggatgggcgggagagaagtttgaaggaagaggagaagactggaatggaaaagaggaagagacaggagggagagagagagaagccatggcaggagacattaagattctgttctgtgtatttacaggttgctattaatatgttcttaagggatggatggtactgggctttgtatgtttaggtgggcaattatatcttatcaattggatctaaa

SEQ ID NO: 12918 - protein, 385 aa, Rattus norvegicus
  ref <308>: DATABASE ACCESSION NUMBER: SWISS-Prot / AAA42129
  ref <309>: DATABASE ENTRY DATE: 2001-09-06
MWRSLGLALALCLLPYGGAESQGQSPACKQAPPWNIGDQNPMLNSEGTVTVVALLQASCYLCLLQASRLEDLRIKLENQGYFNISYIVVNHQGSPSQLKHAHLKKQVSDHIAVYRQDEHQTDVWTLLNGNKDDFLIYDRCGRLVYHLGLPYSFLTFPYVEEAIKIAYCEKRCGNCSFTSLEDEAFCKNVSSATASKTTEPSEEHNHHKHHDKHGHEHLGSSKPSENQQPGALDVETSLPPSGLHHHHHHHKHKGQHRQGHLESCDMGASEGLQLSLAQRKLCRRGCINQLLCKLSEESGAATSSCCCHCRHLIFEKSGSAITCQCAENLPSLCSCQGLFAEEKVIESCQCRSPPAACHSQHVSPTEASPNCSCNNKTKKCKCNLN

SEQ ID NO: 12919 - DNA, 2038 bp, Homo sapiens
  ref <308>: DATABASE ACCESSION NUMBER: EMBL / Z11793
  ref <309>: DATABASE ENTRY DATE: 1997-11-30
gcaggcccgttggaagtggttgtgacaaccccagcaatgtggagaagcctggggcttgccctggctctctgtctcctcccatcgggaggaacagagagccaggaccaaagctccttatgtaagcaacccccagcctggagcataagagatcaagatccaatgctaaactccaatggttcagtgactgtggttgctcttcttcaagccagctgatacctgtgcatcatcgaggcatctaaattagaagacctgcgagtaaaactgaagaaagaaggatattctaatatttcttatattgttgttaatcatcaaggaatctcttctcgattaaaatacacacatcttaagaataaggtttcagagcatattcctgtttatcaacaagaagaaaaccaaacagatgtctggactcttttaaatggaagcaaagatgacttcctcatatatgatagatgtggccgtcttgtatatcatcttggtttgcctttttccttcctaactttcccatatgtagaagaagccattaagattgcttactgtgaaaagaaatgtggaaactgctctctcacgactctcaaagatgaagacttttgtaaacgtgtatctttggctactgtggataaaacagttgaaactccatcgcctcattaccatcatgagcatcatcacaatcatggacatcagcaccttggcagcagtgagctttcagagaatcagcaaccaggagcaccaaatgctcctactcatcctgctcctccaggccttcatcaccaccataagcacaagggtcagcataggcagggtcacccagagaaccgagatatgccagcaagtgaagatttacaagatttacaaaagaagctctgtcgaaagagatgtataaatcaattactctgtaaattgcccacagattcagagttggctcctaggagctgatgctgccattgtcgacatctgatatttgaaaaaacagggtctgcaatcacctgacagtgtaaagaaaacctcccatctttatgtagctgacagggacttcgggcagaggagaacataactgaatcttgtcagtgacgtttgcctccagctgcctgacaaataagtcagcagcttatacccacagaagccagtgccagttgacgctgaaagaatcaggcaaaaaagtgagaatgaccttcaaactaaatatttaaaataggacatactccccaatttagtctagacacaatttcatttccagcatttttataaactaccaaattagtgaaccaaaaatagaaattagatttgtgcaaacatggagaaatctactgaattggcttccagattttaaattttatgtcatagaaatattgactcaaaccatattttttatgatggagcaactgaaaggtgattgcagcttttggttaatatgtctttttttttctttttccagtgttctatttgctttaatgagaatagaaacgtaaactatgacctaggggttttctgttggataattagcagtttagaatggaggaagaacaacaaagacatgctttccattttttcctttacttatctctcaaaacaatattactttgtcttttcaatcttctacttttaactaataaaataagtggattttgtattttaagatccagaaatacttaacacgtgaatattttgctaaaaaagcatatataactattttaaatatccatttatcttttgtatatctaagactcatcctgatttttactatcacacatgaataaaggcctttgtatctttctttctctaatgttgtatcatactcttctaaaacttgagtggctgtcttaaaagatataaggggaaagataatattgtctgtctctatattgcttagtaagtatttccatagtcaatgatggtttaataggtaaaccaaaccctataaacctgacctcctttatggttaatactattaagcaagaatgcagtacagaattggatacagtacggatttgtccaaataaattcaataaaaaccttaaaaaaaaaaaaaaaaaaaaaa

SEQ ID NO: 12920 - protein, 381 aa, Homo sapiens
  ref <308>: DATABASE ACCESSION NUMBER: SWISS-Prot / CAA77836
  ref <309>: DATABASE ENTRY DATE: 2001-10-16
MWRSLGLALALCLLPSGGTESQDQSSLCKQPPAWSIRDQDPMLNSNGSVTVVALLQASCYLCIIEASKLEDLRVKLKKEGYSNISYIVVNHQGISSRLKYTHLKNKVSEHIPVYQQEENQTDVWTLLNGSKDDFLIYDRCGRLVYHLGLPFSFLTFPYVEEAIKIAYCEKKCGNCSLTTLKDEDFCKRVSLATVDKTVETPSPHYHHEHHHNHGHQHLGSSELSENQQPGAPNAPTHPAPPGLHHHHKHKGQHRQGHPENRDMPASEDLQDLQKKLCRKRCINQLLCKLPTDSELAPRSCCCHCRHLIFEKTGSAITCQCKENLPSLCSCQGLRAEENITESCQCRLPPAACQISQQLIPTEASASCRCKNQAKKCECPSN

SEQ ID NO: 12921 - DNA, 936 bp, Rattus norvegicus
  ref <308>: DATABASE ACCESSION NUMBER: EMBL / M64378
  ref <309>: DATABASE ENTRY DATE: 2000-03-04
atggcttggagtactggccagaacctgtccacaccaggaccattcatcttgctgggcttcccagggccaaggagcatgcgcattgggctcttcctgcttttcctggtcatgtatctgcttacggtagttggaaacctagccatcatctccctggtaggtgcccacagatgcctacagacacccatgtacttcttcctctgcaacctctccttcctggagatctggttcaccacagcctgcgtacccaagaccctggccacatttgcgcctcggggtggagtcatttccttggctggctgtgccacacagatgtactttgtcttttctttgggctgtaccgagtacttcctgctggctgtgatggcttatgaccgctacctggccatctgcctgccactgcgctatggtggcatcatgactcctgggctggcgatgcggttggccctgggatcctggctgtgtgggttttctgcaatcacagttcctgctaccctcattgcccgcctctctttctgtggctcacgtgtcatcaaccacttcttctgtgacatttcgccctggatagtgctttcctgcaccgacacgcaggtggtggaactggtgtcctttggcattgccttctgtgttattctgggctcgtgtggtatcacactagtctcctatgcttacatcatcactaccatcatcaagattccctctgcccggggccggcaccgcgccttctcaacctgctcatcccatctcactgtggtgctgatttggtatggctccaccatcttcttgcatgtgaggacctcggtagagagctccttggacctcaccaaagctatcacagtgctcaacaccattgtcacacctgtgctgaaccctttcatatatactctgaggaacaaggatgtcaaggaagctctgcgcaggacggtgaaggggaagtga

SEQ ID NO: 12922 - protein, 311 aa, Rattus norvegicus
  ref <308>: DATABASE ACCESSION NUMBER: SWISS-Prot / AAA41741
  ref <309>: DATABASE ENTRY DATE: 1993-07-01
MAWSTGQNLSTPGPFILLGFPGPRSMRIGLFLLFLVMYLLTVVGNLAIISLVGAHRCLQTPMYFFLCNLSFLEIWFTTACVPKTLATFAPRGGVISLAGCATQMYFVFSLGCTEYFLLAVMAYDRYLAICLPLRYGGIMTPGLAMRLALGSWLCGFSAITVPATLIARLSFCGSRVINHFFCDISPWIVLSCTDTQVVELVSFGIAFCVILGSCGITLVSYAYIITTIIKIPSARGRHRAFSTCSSHLTVVLIWYGSTIFLHVRTSVESSLDLTKAITVLNTIVTPVLNPFIYTLRNKDVKEALRRTVKGK

SEQ ID NO: 12923 - DNA, 650 bp, Homo sapiens
  ref <308>: DATABASE ACCESSION NUMBER: EMBL / AF399604
  ref <309>: DATABASE ENTRY DATE: 2001-08-27
ttcctggagatttggtataccacagcagcagtgcccaaagcactggccatcctactggggagaagtcagaccatatcatttacaagctgtcttttgcagatgtactttgttttctcattaggctgcacagagtacttcctcctggcagccatggcttatgaccgctgtcttgccatctgctatcctttacactacggagccatcatgagtagcctgctctcagcgcagctggccctgggctcctgggtgtgtggtttcgtggccattgcagtgcccacagccctcatcagtggcctgtccttctgtggcccccgtgccatcaaccacttcttctgtgacattgcaccctggattgccctggcctgcaccaacacacaggcagtagagcttgtggcctttgtgattgctgttgtggttatcctgagttcatgcctcatcacctttgtctcctatgtgtacatcatcagcaccatcctcaggatcccctctgccagtggccggagcaaagccttctccacgtgctcctcgcatctcaccgtggtgctcatttggtatgggtccacagttttccttcacgtccgcacctctatcaaagatgccttggatctgatcaaagctgtccacgtcctgaacactgtggtgactccagt

SEQ ID NO: 12924 - protein, 217 aa, Homo sapiens
  ref <308>: DATABASE ACCESSION NUMBER: SWISS-Prot / AAK95089
  ref <309>: DATABASE ENTRY DATE: 2003-02-01
FLEIWYTTAAVPKALAILLGRSQTISFTSCLLQMYFVFSLGCTEYFLLAAMAYDRCLAICYPLHYGAIMSSLLSAQLALGSWVCGFVAIAVPTALISGLSFCGPRAINHFFCDIAPWIALACTNTQAVELVAFVIAVVVILSSCLITFVSYVYIISTILRIPSASGRSKAFSTCSSHLTVVLIWYGSTVFLHVRTSIKDALDLIKAVHVLNTVVTPV

SEQ ID NO: 12925 - DNA, 933 bp, Rattus norvegicus
  ref <308>: DATABASE ACCESSION NUMBER: EMBL / M64385
  ref <309>: DATABASE ENTRY DATE: 2000-03-04
atgaacaatcaaactttcatcacccaattccttctcctgggactgcccatccctgaagaacatcagcacctgttctatgccttgttcctggtcatgtacctcaccaccatcttgggaaacttgctaatcattgtacttgttcaactggactcccagctccacacacctatgtatttgtttctcagcaatttgtctttctctgatctatgtttttcctctgtcacaatgcccaagctgctgcagaacatgaggagccaggacacatccattccctatggaggctgcctggcacaaacatacttctttatggtttttggagatatggagagtttccttcttgtggccatggcctatgaccgctatgtggccatctgcttccctctgcattacaccagcatcatgagccccaagctctgtacttgtctagtgctgttattgtggatgctgacgacatcccatgccatgatgcacacactgcttgcagcaagattgtctttttgtgagaacaatgtggtcctcaacttcttctgtgacctatttgttctcctaaagctggcctgctcagacacttatattaatgagttgatgatatttatcatgagtacactcctcattattattccattcttcctcattgttatgtcctatgcaaggatcatatcctctattcttaaggttccatctacccaaggcatctgcaaggtcttctctacctgtggttcccatctgtctgtagtatcactgttctatgggacaattattggtctctacttatgtccagcaggtaataattccactgtaaaagagatggtcatggccatgatgtacactgtggtgacccccatgctgaatcccttcatctacagcctaaggaatagagatatgaagagggccctaataagagttatctgtagtatgaaaatcactctgtaa

SEQ ID NO: 12926 - protein, 310 aa, Rattus norvegicus
  ref <308>: DATABASE ACCESSION NUMBER: SWISS-Prot / AAA41748
  ref <309>: DATABASE ENTRY DATE: 1993-07-01
MNNQTFITQFLLLGLPIPEEHQHLFYALFLVMYLTTILGNLLIIVLVQLDSQLHTPMYLFLSNLSFSDLCFSSVTMPKLLQNMRSQDTSIPYGGCLAQTYFFMVFGDMESFLLVAMAYDRYVAICFPLHYTSIMSPKLCTCLVLLLWMLTTSHAMMHTLLAARLSFCENNVVLNFFCDLFVLLKLACSDTYINELMIFIMSTLLIIIPFFLIVMSYARIISSILKVPSTQGICKVFSTCGSHLSVVSLFYGTIIGLYLCPAGNNSTVKEMVMAMMYTVVTPMLNPFIYSLRNRDMKRALIRVICSMKITL

SEQ ID NO: 12927 - DNA, 945 bp, Homo sapiens; identical to SEQ ID NO: 1226
  ref <308>: DATABASE ACCESSION NUMBER: EMBL / AF087916
  ref <309>: DATABASE ENTRY DATE: 2000-03-06

SEQ ID NO: 12928 - protein, 314 aa, Homo sapiens; identical to SEQ ID NO: 1227
  ref <308>: DATABASE ACCESSION NUMBER: SWISS-Prot / AAF37309
  ref <309>: DATABASE ENTRY DATE: 2002-06-15

SEQ ID NO: 12929 - DNA, 939 bp, Rattus norvegicus
  ref <308>: DATABASE ACCESSION NUMBER: EMBL / M64391
  ref <309>: DATABASE ENTRY DATE: 2000-03-04
atgactggaaataaccaaactttgatcttggagttcctcctcctgggtctgcccatcccatcagagtatcatctcctgttctatgccctgttcctggccatgtacctcaccatcatcctgggaaacctgctaatcattgtccttgttcgactggactctcatctccacatgcccatgtacttgtttctcagcaacttgtccttctctgacctctgcttttcctctgtcacaatgcccaaattgcttcagaacatgcagagccaagtaccatctatatcctatacaggctgcctgacacagctgtacttctttatggtttttggagatatggagagcttccttcttgtggtcatggcctatgaccgctatgtggccatttgctttcctttgcgttacaccaccatcatgagcaccaagttctgtgcttcactagtgctacttctgtggatgctgacgatgacccatgccctgctgcataccctactcattgctagattgtctttttgtgagaagaatgtgattcttcactttttctgtgacatttctgctcttctgaagttgtcctgctcagacatttatgttaatgagctgatgatatatatcttgggtggactcatcattattatcccattcctattaattgttatgtcctatgttagaattttcttctccattttgaagtttccatctattcaggacatctacaaggtattctcaacctgtggttcccatctgtctgtggtgaccttgttttatgggacaatttttggtatctacttatgtccatcaggtaataattctactgtgaaggagattgccatggctatgatgtacacagtggtgactcccatgctgaatcccttcatctacagcctgaggaacagagacatgaaaagggccctaataagagttatctgcactaagaaaatctctctgtaa

SEQ ID NO: 12930 - protein, 312 aa, Rattus norvegicus
  ref <308>: DATABASE ACCESSION NUMBER: SWISS-Prot / AAA41754
  ref <309>: DATABASE ENTRY DATE: 1993-07-01
MTGNNQTLILEFLLLGLPIPSEYHLLFYALFLAMYLTIILGNLLIIVLVRLDSHLHMPMYLFLSNLSFSDLCFSSVTMPKLLQNMQSQVPSISYTGCLTQLYFFMVFGDMESFLLVVMAYDRYVAICFPLRYTTIMSTKFCASLVLLLWMLTMTHALLHTLLIARLSFCEKNVILHFFCDISALLKLSCSDIYVNELMIYILGGLIIIIPFLLIVMSYVRIFFSILKFPSIQDIYKVFSTCGSHLSVVTLFYGTIFGIYLCPSGNNSTVKEIAMAMMYTVVTPMLNPFIYSLRNRDMKRALIRVICTKKISL

SEQ ID NO: 12931 - DNA, 945 bp, Homo sapiens
  ref <308>: DATABASE ACCESSION NUMBER: Refseq / NM_003553
  ref <309>: DATABASE ENTRY DATE: 2000-12-01
atgatgggacaaaatcaaaccagcatctcagacttcctgctcctgggcctgcccatccaaccagagcagcaaaacctgtgctatgccctgttcttggccatgtatcttaccaccctcctggggaacctcctcatcattgtcctcattcgactggattcccatctccacacgcctatgtatttgtttctcagcaacttgtccttctctgacctctgcttctcttccgtgaccattcccaagttgttacagaacatgcagaaccaggacccatccatcccctatgcggactgcctgacccaaatgtacttcttcctgttatttggagacctggagagcttcctccttgtggccatggcctatgaccgctatgtggccatctgcttccccctgcactacaccgccatcatgagccccatgctctgtctcaccctggtggcgctgtcctgggtgctgaccaccttccatgccatgttacacactttactcatggccaggttgtgtttttgtgcagacaatgtgatcccccactttttctgtgatatgtctgctctgctgaagctggccttctctgacactcgagttaatgaatgggtgatatttatcatgggagggctcattcttgtcatcccattcctactcatccttgggtcctatgcaagaattgtctcctccatcctcaaggtcccttcttctaagggtatctgcaaggccttctctacttgtggctcccacctgtctgtggtgtcactgttctatggaaccgttattggtctctacttatgctcatcagctaatagttctactctaaaggacactgtcatggctatgatgtacactgtggtgacccccatgctgaaccccttcatctacagcctgaggaacagagacatgaagggagccctgagcagagtcattcatcagaagaaaactttcttctctctctga

SEQ ID NO: 12932 - protein, 314 aa, Homo sapiens
  ref <308>: DATABASE ACCESSION NUMBER: Refseq / NP_003544
  ref <309>: DATABASE ENTRY DATE: 2000-12-01
MMGQNQTSISDFLLLGLPIQPEQQNLCYALFLAMYLTTLLGNLLIIVLIRLDSHLHTPMYLFLSNLSFSDLCFSSVTIPKLLQNMQNQDPSIPYADCLTQMYFFLLFGDLESFLLVAMAYDRYVAICFPLHYTAIMSPMLCLTLVALSWVLTTFHAMLHTLLMARLCFCADNVIPHFFCDMSALLKLAFSDTRVNEWVIFIMGGLILVIPFLLILGSYARIVSSILKVPSSKGICKAFSTCGSHLSVVSLFYGTVIGLYLCSSANSSTLKDTVMAMMYTVVTPMLNPFIYSLRNRDMKGALSRVIHQKKTFFSL

SEQ ID NO: 12933 - DNA, 5480 bp, Rattus norvegicus
  ref <308>: DATABASE ACCESSION NUMBER: EMBL / M64793
  ref <309>: DATABASE ENTRY DATE: 2000-03-04
ggatcccctttgctatgtagtttttaatggaaattacaacccatagtgtgttgataaatagagagtcctgtttggtttaagcaacctctgtttctcataaactccataaaaacaggaatactctttgtttctagcataaccaaaagatttagtgaattgaaaacaatgttcccttagagtataggtctaataaccccgaaaatattaccatgatactgagcatttgtaagtatctcatagcatgtagtatccatagtccatcaatgagagagacatttaacatgattttcattaatcaggtggaaaagacatgacaacattcacaggcactgcacagaacatagtggtccaccttgcacatatttcactaaactaggtttatctattttgttgctttctctaacatctctgcaatgaagcaggtcaacagtgccacatatcctttacttaacctaaggaacacaaaaaattttctacatatatcctggttagagagtgcttaaaataagttttccaagaatggaaaagaaatgttctgacttaacaattaagacagtatttatttaaagcaagaaatatgaggcacacaagaaaatattttgggaagaaaccatttggtgaacaatatttcaaataaaaatagacaaacatagttaattgtaaaacatatgtttgaccagcccttcttttcaataggcttaatgtgaataaaatgttaaagattctctttgggtggctgcaaattgtccacgaataagacaaaatataaaaataaggactgagtctcacaaaatgaaaaggaaatatattcagaaagagaatcttgagagaatgtgttgtcacaaattaaagaaaacctgtggtgaatgacatcctgaggcctgagctattactgacatttaagataaaggtaactgtatacatttgtcccattgaggggacaagaaagctgctctcatgttcagctctataattcttgccttaaacaacttaaatagaatgatttaaaatatggagctgtccatggacctttgaaatataaaatagtcaagcaacttatcaaggaattacagattccttgatactaacacaggtaaatcccacacgtgttttgagactacatttgctgggattttattgatgtaataggtcacatgtttttcgggccaatgttgctgttattcggttacttcaagagaatagtggcaactgatgctatgtattctaggggtttgaagtgatgtttcatgattgaaatttgtaaaagaataacatcatcattcttaacaatagaacatataaagtcacacagaagtgacagtgtttaagctgtactattgatcaaagaaatttattaccttcagtttcaatggaaataattactgataatacaaacatgtgtgaacacacactaatcctatccaaatgcacagtgatacacagaaaatattagcaagtagaatgcaatatttatataacgattgtatttatcaatcaattgtatgtatcaatatatgggctattttcttacacatgattttattcaaatttactctaatcattgttgaaccatttagaaaaggcatactggcaacttttccttacctcatccagctgggcaaaagtcccagtgtggagtaaaggatgcaagatttcctgctctgttaagtataaaataatagtatgaattcaaaggtgccattcttctgcttctagttataaaggcagtgcttgcttcttccagcacagatttgggagaaactacagagcctcttccaagatgctggtggccctcctcacaatggtcctgctgggcctgagctttgctcaggaaccaggtgaaggtctgagaatatgggtgttggtgctgtggctcttcttaaataataagagaaaatactgcaaggtaggagagagatgagacagaggacaggagatgaaagataaataagaccacacacagtgctttagtttttaaaaatggatagtcttggatttgaggacactgttatagttaaaatacactacatatgtgtgtaatgttgctatactatttactaagtaaaggtggcagaaatacccatgaaagaaccatttaaagaataggagatgaaggaaagaaccatttaaagaataggagatgaagtaaaacctattacatctattacacagaaaagaataacatcttctgaattttcatttttccatactcattcaaaattccaatatattatcagtgtgtttttaattatttattcaaatgtttatttatattcccttactttgagaacgtcagaaaggtagaagataagaattaaataaggaagagattgcatagaggtagaatatacaaacattcttatacatacatggcttatcagtgtatgcagaaagattctatgtaaaatagtgacaaccaagagacttttattttgttacttactggtagacactcaaaatatatttaccagagacgccttcaaattactggtagacactcaaaatatatttaccagagacgcttcaaattactgctagctgctcattttcctaacggtgtttataaattatcaggaaatgagattgtagctaaaatcacctgccacctgtaaattgctagttgtttttgtgaactcacttttgaatctgtcctttgttttgcttcacaatggccatctctgaacactctttcccaattacatcaagcaaatacaaataatctttaaaattcttatgtatctttagtaagcaggatgttttataattctacactttattgttattttggcttttatgaattaataaatgtaagtttcacaaaggttcagccaaacattctccaaatacgataatgatgaacactctagggtaatgcagtaaattaaaataaactagaggtctgaattacctgagaaaaaaaagcaatttactacaacagagaagtagttgacttgacaaataaaacttagttcagtgtccctattttgactactctatggaaagaggagttcctcaatgtcttcttccaaacccttgttgcctgtatttcagttgatttcaacagaaaaaaagtactcaaatgtacttttctcttttcaaatgtctcttttctttgtgactctatactcaaagaaatgtattgagcctattgattataacctctgatgaatttgttcagtgaatactgtatggttggtaatttttagacttgtcttcccctcataatattcatcaacagcagggccaattttcagagctatctgcttggttgaatttttaccatgacacatattgatttgatctggattcccaaagtcaatttcccccaaaatataatagtcagtgaaatctccatatgtgagctaatttacttgttttattttgtctgagaaaaatgatcatgaatactcttgaaactgaattatgtgtacttgcatgtgaccaaaagaccatgtttaacatgaacttttcatgaaactataaacaagtgctatctagaaaaaatgctgtgtgaaaaagtcattgaaataaaaaagtccagtatatctaagctcatatgtcatttgcttttatcactcagaacttcagaacctaaaccaggtccccaatcagaggccaccaccttcaggattcctaccaagaccacctggtaataggaaccagcaaggcccaccaccaaaaggaggcccacagcagagacctcctcaaggcccacccccaccaggaggtccacagcagaaacctcaaggcccacccccaccaggaggcccacagcagagacctcaaggcccacccccaccaggaggcccacagcagggacctcaaggcccacccccaccaggaggcccacagcagagacctcaaggtccacccccaccaggaggtccacagcagggacctcaaggcccacccccaccaggaggcccacagcagggacctcaaggtccacccccaccaggaggtccacagcagagcccccctcaaggtccacccccaccaggaggtccacagcagggacctcaaggcccacccccaccaggaggtccacagcagagcccccctcaaggtccacccccaccaggaggtccacagcagggacctcaaggcccacccccaccaggaggtccacagcagggacgtcaaggtccacccccaccaggaggccctcagcaagatcctcctcaaggcccacccccaccaggaggcccacagcagagacctcctcaaggcccacccccaccaggacgcccccaacagagacctcctcagcctggaaaccaacaaggccctccacaaggtccccagtctggcagacctcagggacctcagcaaaccagatatcagtgaaaggtatgtttcatgttaatgccctggtgggtggcagggagcagaactcttctatatttcacattatttaaagtatacaacttaaatatgtagtaacattgtcctggacccaatatcaaatatttttattaactattgaatgatcttttcatgagagaatatatgcttttggaggaatatatcctcctcatttggttttcaacaattattttattaattacctccttctggcaagaagacccgttttcttcctaaggtacttttcctcctttatgggattcatgtatgcaaaaggatacacagatctcatcatgttctttgttcttatttttctttcttttaccacaaactaaattcttatgattgacatatcatgttctctctataccctgcctttgtgatcttttttcttttgaatttcagaaactaagaaagtggttccctcacactcttcttccactgccaccacaggatgagaactggatcttcattcactgcattaataaaatgatcagcatgcaacttctgattggtgtatttctttcttggtcttcttcctcctgcaatatcaggactcacaattacctaaaatcacccatattctctcaggcttcagcctgtaatttctcccagcaactgtccataagccaggtaccaggtaccaggtcttttactgctgtgtttctgcctgagtcataaagcagacactctcttcccagagttgtgtagtatctatctctgaaaatgggtgtttgggtgttgctttgcctaatctggggtgcaaggtcaagcagctatgaaccaaatgccttccaaaagggtcgtggtgcatatggatgtgtcctggggcaccagtgtgtctcagagaaagggaggaatgaccaaacatctttggaagaagtagtaggctgataggctataatcactgatatactggtctgcagtggctataggtcatccaaggtagatagcagagttttcaagacatggctgcacccttgtgttgtcttactcatggtttcatgtcctctacaaaacatcatggccaagaagcaagttggagtggaaaggacatattcaccttacaattccacatttctgctcacaaccaaaggaaattaggactggaattc

SEQ ID NO: 12934 - protein, 274 aa, Rattus norvegicus
  ref <308>: DATABASE ACCESSION NUMBER: SWISS-Prot / AAA42064
  ref <309>: DATABASE ENTRY DATE: 2003-02-01
MLVALLTMVLLGLSFAQEPELQNLNQVPNQRPPPSGFLPRPPGNRNQQGPPPKGGPQQRPPQGPPPPGGPQQKPQGPPPPGGPQQRPQGPPPPGGPQQGPQGPPPPGGPQQRPQGPPPPGGPQQGPQGPPPPGGPQQGPQGPPPPGGPQQSPPQGPPPPGGPQQGPQGPPPPGGPQQSPPQGPPPPGGPQQGPQGPPPPGGPQQGRQGPPPPGGPQQDPPQGPPPPGGPQQRPPQGPPPPGRPQQRPPQPGNQQGPPQGPQSGRPQGPQQTRYQ

SEQ ID NO: 12935 - DNA, 1947 bp, Rattus norvegicus
  ref <308>: DATABASE ACCESSION NUMBER: EMBL / M67465
  ref <309>: DATABASE ENTRY DATE: 2000-03-04
tgccttcagggtctccaacccttggaaacaaaacgaccaccacacatctactgttctctcaactatctgcttcctgtgttgaccatgcctgggtggagctgcctggtgacaggagcaggaggatttctgggccagaggattgtccaaatgttggtgcaagagaaagagctgcaggaggtcagagtcctgtataggaccttcagtccaaaacacaaagaggaactgtccaagctgcagacaaaagccaaggtgacggtactgaggggagacattgtggatgcccagttcctgaggagagcgtgccagggcatgtccgtcatcatccacaccgctgctgcccttgatatcgcaggcttcctgcccaggcagaccatcctagatgtcaatgtgaaaggtactcagctcctgttggatgcttgtgtggaagccagcgtaccagccttcatctacagcagctcaacaggtgtggctggaccaaactcctacaaggagaccatcctgaacgaccgtgaggaagagcatcgtgaaagcacatggtcaaatccatacccatacagcaaaaggatggccgagaaggcagtgctggcagccaatgggagcatcctgaaaaatggtggcacttttcatacatgtgccttaagactcccattcatctatggggaagaaagccaaatcatttcaaccatggtaaatagagcactcaagaacaacagcataattaaaagacatgccacattctccatagccaacccagtgtatgtgggtaatgcagcctgggcacacattctggctgccaggggccttcgagaccccgagaagtcacaaagcatccaaggacagttctactacatctcagatgacacccctcaccaaagctatgatgatttaaattataccctgagcaaagaatggggcttctgccttgattccagttggagccttcctctgcccctgctctactggcttgccttcctgctggaaactgtgagcttcctgctgcgtccattttacaactataggccaccctttaaccgcttcatggtcacgatcttaaatagcgtgtttaccatttcctacaagaaagctcagagagatctgggctatgagccacttgtcagctgggaggaagccaagcaaaaaacctcggagtggatcgggacactagtggagcaacacagggagacactggacacaaagtctcaatgatgggaagagggcagggacatggccccgggtgttaccccgtcctccagccaggaactcagaaataatccaactcttacagttttattttatacactctccaactggtcttcaggtcaccagaaaccttaagagtcactggcccagtcacctgaacaaggtgcaggggacatcatgtagaaggaataaaactgcctgcctcttgtgacacctgggtgttcattcacctgccatgtggtatcacaaacagaagtaggatctcagctggcatcaaaacttcttctttcttacttaccccatattaagtaatgtttataggaagtaatgtttgtaggtggggcttgagctcccacactagagtcaggaggcaaaaccatgctgaagttctatatagcaaaccaaacctgagagtactttcctgatcactacaatagcaagagagcaagagcgagagtgagagcaagagcgagagagggagggaggaagggaggaaaggggatggagggagggaggaagggaaggagagagagagagagagagagagagagagcatcaccatttcacatagggtgtgaacagagtaggaaatcactttgtttctcatttaccaagagaccatctgaaagaatctgcctttctttgcccctgtcataccaagaaaccttattttcgcttattggacaatgttctatggtataaaaaataagagttgtctggttctgggaataaaactaaattccaagg

SEQ ID NO: 12936 - protein, 372 aa, Rattus norvegicus
  ref <308>: DATABASE ACCESSION NUMBER: SWISS-Prot / AAA41352
  ref <309>: DATABASE ENTRY DATE: 2001-10-16
PGWSCLVTGAGGFLGQRIVQMLVQEKELQEVRVLYRTFSPKHKEELSKLQTKAKVTVLRGDIVDAQFLRRACQGMSVIIHTAAALDIAGFLPRQTILDVNVKGTQLLLDACVEASVPAFIYSSSTGVAGPNSYKETILNDREEEHRESTWSNPYPYSKRMAEKAVLAANGSILKNGGTFHTCALRLPFIYGEESQIISTMVNRALKNNSIIKRHATFSIANPVYVGNAAWAHILAARGLRDPEKSQSIQGQFYYISDDTPHQSYDDLNYTLSKEWGFCLDSSWSLPLPLLYWLAFLLETVSFLLRPFYNYRPPFNRFMVTILNSVFTISYKKAQRDLGYEPLVSWEEAKQKTSEWIGTLVEQHRETLDTKSQ

SEQ ID NO: 12937 - DNA, 1665 bp, Homo sapiens
  ref <308>: DATABASE ACCESSION NUMBER: Refseq / NM_000862
  ref <309>: DATABASE ENTRY DATE: 2002-11-05
actcttctgtccagcttttaacaatctaactaatgccctctccagggtcaccctagggtcaccctagaatcagatctgctccccagcatcttctgtttcctggtgagtgattcctgctactttggatggccatgacgggctggagctgccttgtgacaggagcaggagggtttctgggacagaggatcatccgcctcttggtgaaggagaaggagctgaaggagatcagggtcttggacaaggccttcggaccagaattgagagaggaattttctaaactccagaacaagaccaagctgacagtgctggaaggagacattctggatgagccattcctgaagagagcctgccaggacgtctcggtcatcatccacaccgcctgtatcattgatgtcttcggtgtcactcacagagagtctatcatgaatgtcaatgtgaaaggtacccagctcctgttagaggcctgtgtccaagctagtgtgccagtcttcatctacaccagtagcatagaggtagccgggcccaactcctacaaggaaatcatccagaatggccatgaagaagagcctctggaaaacacatggcccgctccatacccacacagcaaaaagcttgctgagaaggctgtactggcggctaacgggtggaatctgaaaaacggcggcaccctgtacacttgtgccttacgacccatgtatatctatggggaaggaagccgattcctttctgctagtataaacgaggccctgaacaacaatgggatcctgtcaagtgttggaaagttctccactgttaacccagtctatgttggcaatgtggcctgggcccacattctggccttgagggccctgcaggaccccaagaaggccccaagcatccgaggacagttctactatatctcagatgacacgcctcaccaaagctatgataaccttaattacaccctgagcaaagagttcggcctccgccttgattccagatggagctttcctttatccctgatgtattggattggcttcctgctggaaatagtgagcttcctactcaggccaatttacacctatcgaccgcccttcaaccgccacatagtcacattgtcaaatagcgtattcaccttctcttataagaaggctcagcgagatctggcgtataagccactctacagctgggaggaagccaagcagaaaacggtggagtgggttggttcccttgtggaccggcacaaggagaccctgaagtccaagactcagtgatttaaggatgacagagatgtgcatgtgggtattgttaggagatgtcatcaagctccaccctcctggcctcatacagaaagtgacaagggcacaagctcaggtcctgctgcctccctttcatacaatggccaacttattgtattcctcatgtcatcaaaacctgcgcagtcattggcccaacaagaaggtttctgtcctaatcatataccagaggaaagaccatgtggtttgctgttaccaaatctcagtagctgattctgaacaatttagggactcttttaacttgagggtcgttttgactactagagctccatttctactcttaaatgagaaaggatttcctttctttttaatcttccattccttcacatagtttgataaaaagatcaataaatgtttgaatgttaaaaaa

SEQ ID NO: 12938 - protein, 373 aa, Homo sapiens
  ref <308>: DATABASE ACCESSION NUMBER: Refseq / NP_000853
  ref <309>: DATABASE ENTRY DATE: 2002-11-05
MTGWSCLVTGAGGFLGQRIIRLLVKEKELKEIRVLDKAFGPELREEFSKLQNKTKLTVLEGDILDEPFLKRACQDVSVIIHTACIIDVFGVTHRESIMNVNVKGTQLLLEACVQASVPVFIYTSSIEVAGPNSYKEIIQNGHEEEPLENTWPAPYPHSKKLAEKAVLAANGWNLKNGGTLYTCALRPMYIYGEGSRFLSASINEALNNNGILSSVGKFSTVNPVYVGNVAWAHILALRALQDPKKAPSIRGQFYYISDDTPHQSYDNLNYTLSKEFGLRLDSRWSFPLSLMYWIGFLLEIVSFLLRPIYTYRPPFNRHIVTLSNSVFTFSYKKAQRDLAYKPLYSWEEAKQKTVEWVGSLVDRHKETLKSKTQ

SEQ ID NO: 12939 - DNA, 679 bp, Rattus norvegicus
  ref <308>: DATABASE ACCESSION NUMBER: EMBL / M73701
  ref <309>: DATABASE ENTRY DATE: 2000-03-04
acagaatctaggctcagagcttgagatctcaagatgggagatgaggagaagcgcaacagggccatcacggcccggagacagcacctgaagagtgtgatgctccagatcgcggccacagagctggagaaagaggaaagccgccgcgaatccgagaagcagaactacctgtcagaacactgcccgcctctgcacatcccaggctccatgtctgaagtgcaggaactctgcaaacaactgcatgcgaagatcgatgcggctgaagaggagaaatatgacatggaggtgaaggtgcagaagagcagcaaggagctggaagacatgaaccagaagctatttgacctgaggggcaagttcaagaggcccccactccggagggtgcgtatgtcagctgacgccatgctgaaggcgctgctgggctctaagcacaaggtgtgcatggacctgagagccaacctgaagcaggtcaagaaggaagacactgagaaggagcgggacctgcgtgacgtgggtgactggaggaagaatattgaggagaagtctggcatggagggtcggaagaagatgtttgagtctgagtcctaactgcctacttccccagtcccaccctaccattggggaagcacctaacatccagtctggagtacttggcctcactccaataaaggattcgcatcccttc

SEQ ID NO: 12940 - protein, 181 aa, Rattus norvegicus
  ref <308>: DATABASE ACCESSION NUMBER: SWISS-Prot / AAA42149
  ref <309>: DATABASE ENTRY DATE: 1996-02-01
GDEEKRNRAITARRQHLKSVMLQIAATELEKEESRRESEKQNYLSEHCPPLHIPGSMSEVQELCKQLHAKIDAAEEEKYDMEVKVQKSSKELEDMNQKLFDLRGKFKRPPLRRVRMSADAMLKALLGSKHKVCMDLRANLKQVKKEDTEKERDLRDVGDWRKNIEEKSGMEGRKKMFESES

SEQ ID NO: 12941 - DNA, 701 bp, Homo sapiens
  ref <308>: DATABASE ACCESSION NUMBER: Refseq / NM_003282
  ref <309>: DATABASE ENTRY DATE: 2000-10-31
ctaggctccaagctcaggacctcaggatgggagatgaggagaagcggaacagggccatcacggcccgcaggcagcacctgaagagcgtgatgctgcagatagcggccacggagctggagaaggaggagagccgccgtgaggcagagaagcagaactacctggcggagcactgcccgccgctgcatatcccgggctccatgtctgaagtgcaggagctctgcaaacagctgcacgccaagatcgatgcggctgaagaggagaagtacgacatggaggtgagggtgcagaagaccagcaaggagctggaggacatgaaccagaagctatttgatctgcggggcaagttcaagcggcccccactgcggagggtgcgcatgtcggccgatgccatgctcaaggccctgctgggctcgaagcacaaggtgtgcatggacctgagggccaacctgaagcaggtcaagaaggaggacacagagaaggagcgggacctgcgagacgtgggtgactggaggaagaacatcgaggagaagtctggcatggagggccggaagaagatgtttgagtccgagtcctaggccactcgctgcccctacgcctgccccggtgcccggctcccagcagaacatactagggagatgcacccagagcctgccagggagggctggcctcaccaccaccgtcaataaaggatttgaatcccc

SEQ ID NO: 12942 - protein, 182 aa, Homo sapiens
  ref <308>: DATABASE ACCESSION NUMBER: Refseq / NP_003273
  ref <309>: DATABASE ENTRY DATE: 2000-10-31
MGDEEKRNRAITARRQHLKSVMLQIAATELEKEESRREAEKQNYLAEHCPPLHIPGSMSEVQELCKQLHAKIDAAEEEKYDMEVRVQKTSKELEDMNQKLFDLRGKFKRPPLRRVRMSADAMLKALLGSKHKVCMDLRANLKQVKKEDTEKERDLRDVGDWRKNIEEKSGMEGRKKMFESES

SEQ ID NO: 12943 - DNA, 936 bp, Rattus norvegicus; identical to SEQ ID NO: 3878
  ref <308>: DATABASE ACCESSION NUMBER: EMBL / M74494
  ref <309>: DATABASE ENTRY DATE: 2000-03-04

SEQ ID NO: 12944 - protein, 243 aa, Rattus norvegicus
  ref <308>: DATABASE ACCESSION NUMBER: SWISS-Prot / AAA41670
  ref <309>: DATABASE ENTRY DATE: 2003-02-01
TVTVCLTLTAKRMARKNCLVKNLEAVETLGSTSTICSDKTGTLTQNRMTVAHMWFDNQIHEADTTENQSGVSFDKTSATWFALSRIAGLCNRAVFQANQENLPILKRAVAGDASESALLKCIEVCCGSVMEMREKYTKIVEIPFNSTNKYQLSIHKNPNASEPKHLLVMKGAPERILDRCSSILLHGKEQPLDEELKDAFQNAYLELGGLGERVLGMQVTAMAPEHSCVKHSDLRVLGVFLLT

SEQ ID NO: 12945 - DNA, 4108 bp, Homo sapiens; identical to SEQ ID NO: 3880
  ref <308>: DATABASE ACCESSION NUMBER: EMBL / D00099
  ref <309>: DATABASE ENTRY DATE: 1998-03-11

SEQ ID NO: 12946 - protein, 1023 aa, Homo sapiens; identical to SEQ ID NO: 3881
  ref <308>: DATABASE ACCESSION NUMBER: SWISS-Prot / P05023
  ref <309>: DATABASE ENTRY DATE: 2002-06-15

SEQ ID NO: 12947 - DNA, 936 bp, Rattus norvegicus; identical to SEQ ID NO: 3878
  ref <308>: DATABASE ACCESSION NUMBER: EMBL / M74494
  ref <309>: DATABASE ENTRY DATE: 2000-03-04

SEQ ID NO: 12948 - protein, 243 aa, Rattus norvegicus; identical to SEQ ID NO: 12944
  ref <308>: DATABASE ACCESSION NUMBER: SWISS-Prot / AAA41670
  ref <309>: DATABASE ENTRY DATE: 2003-02-01

SEQ ID NO: 12949 - DNA, 4108 bp, Homo sapiens; identical to SEQ ID NO: 3880
  ref <308>: DATABASE ACCESSION NUMBER: EMBL / D00099
  ref <309>: DATABASE ENTRY DATE: 1998-03-11

SEQ ID NO: 12950 - protein, 1023 aa, Homo sapiens; identical to SEQ ID NO: 3881
  ref <308>: DATABASE ACCESSION NUMBER: SWISS-Prot / P05023
  ref <309>: DATABASE ENTRY DATE: 2002-06-15

SEQ ID NO: 12951 - DNA, 1341 bp, Rattus norvegicus; identical to SEQ ID NO: 3910
  ref <308>: DATABASE ACCESSION NUMBER: EMBL / M76740
  ref <309>: DATABASE ENTRY DATE: 2000-03-04

SEQ ID NO: 12952 - protein, 447 aa, Rattus norvegicus; identical to SEQ ID NO: 3911
  ref <308>: DATABASE ACCESSION NUMBER: SWISS-Prot / AAA41642
  ref <309>: DATABASE ENTRY DATE: 2003-02-01

SEQ ID NO: 12953 - DNA, 4707 bp, Homo sapiens; identical to SEQ ID NO: 3912
  ref <308>: DATABASE ACCESSION NUMBER: EMBL / AF007194
  ref <309>: DATABASE ENTRY DATE: 2000-03-03

SEQ ID NO: 12954 - protein, 957 aa, Homo sapiens; identical to SEQ ID NO: 3913
  ref <308>: DATABASE ACCESSION NUMBER: SWISS-Prot / AAC02272
  ref <309>: DATABASE ENTRY DATE: 2003-02-01

SEQ ID NO: 12955 - DNA, 1341 bp, Rattus norvegicus; identical to SEQ ID NO: 3910
  ref <308>: DATABASE ACCESSION NUMBER: EMBL / M76740
  ref <309>: DATABASE ENTRY DATE: 2000-03-04

SEQ ID NO: 12956 - protein, 447 aa, Rattus norvegicus; identical to SEQ ID NO: 3911
  ref <308>: DATABASE ACCESSION NUMBER: SWISS-Prot / AAA41642
  ref <309>: DATABASE ENTRY DATE: 2003-02-01

SEQ ID NO: 12957 - DNA, 4707 bp, Homo sapiens; identical to SEQ ID NO: 3912
  ref <308>: DATABASE ACCESSION NUMBER: EMBL / AF007194
  ref <309>: DATABASE ENTRY DATE: 2000-03-03

SEQ ID NO: 12958 - protein, 957 aa, Homo sapiens; identical to SEQ ID NO: 3913
  ref <308>: DATABASE ACCESSION NUMBER: SWISS-Prot / AAC02272
  ref <309>: DATABASE ENTRY DATE: 2003-02-01

SEQ ID NO: 12959 - DNA, 3931 bp, Rattus norvegicus
  ref <308>: DATABASE ACCESSION NUMBER: EMBL / M77809
  ref <309>: DATABASE ENTRY DATE: 2000-03-04
cctggcagtgagagacagtggggagaggagaaagcgggctgctgtccttccaggccactttcgctgcgcgattccgcgagctcccggcaggaggtgaaagtccccggcggggtccggatggcgcagttgcactgcggctgctgagctcgcggccgcctgcgcgcgctgggcgcggggactcgcttcggctagtaactcctccacctcgcggcggacgaccggtcctggacacgctgcctgcgaggcaagttgaacagtgcagagaaggatcttaaagctacacccgacttgccacgattgccttcaatctgaagaaccaaaggctgttggagagatggcagtgacatcccaccacatgatcccggtgatggttgtcctgatgagcgcctgcctggccaccgccggtccagagcccagcacccggtgtgaactgtcaccaatcaacgcctctcacccagtccaggccttgatggagagcttcaccgttctgtctggctgtgccagcagaggcaccaccgggctgccaagggaggtccatgtcctaaacctccgaagtacagatcagggaccaggccagcggcagagagaggttaccctgcacctgaaccccattgcctcggtgcacactcaccacaaacctatcgtgttcctgctcaactccccccagcccctggtgtggcatctgaagacggagagactggccgctggtgtccccagactcttcctggtttcagagggttctgtggtccagtttccatcaggaaacttctccttgacagcagaaacagaggaaaggaatttccctcaagaaaatgaacatctgctgcgctgggcccaaaaggaatatggagcagtgacttcgttcaccgaactcaagatagcaagaaacatctatattaaagtgggagaagatcaagtgtttcctcctacgtgtaacatagggaagaatttcctctcactcaattaccttgccgagtaccttcaacccaaagccgccgaaggttgtgtcctgcccagtcaaccccatgaaaaggaagtacacatcatcgagttaattacccccagctcgaacccttacagcgctttccaggtggatataatagttgacatacgacctgctcaagaggatcccgaggtggtcaaaaaccttgtcctgatcttgaagtgcaaaaagtctgtcaactgggtgatcaagtcttttgacgtcaagggaaacttgaaagtcattgctcccaacagtatcggctttggaaaagagagtgaacgatccatgacaatgaccaaattggtaagagatgacatcccttccacccaagagaatctgatgaagtgggcactggacaatggctacaggccagtgacgtcatacacaatggctcccgtggctaatagatttcatcttcggcttgagaacaacgaggagatgagagatgaggaagtccacaccattcctcctgagcttcgtatcctgctggaccctgaccacccgcccgccctggacaacccactcttcccaggagagggaagcccaaatggtggtctcccctttccattcccggatatccccaggagaggctggaaggagggcgaagataggatcccccggccaaagcagcccatcgttcccagtgttcaactgcttcctgaccaccgagaaccagaagaagtgcaagggggcgtggacatcgccctgtcagtcaaatgtgaccatgaaaagatggtcgtggctgtagacaaagactctttccagaccaatggctactcagggatggagctcaccctgttggatccttcgtgtaaagccaaaatgaatggtactcactttgttctcgagtctcccctgaatggctgtggtactcgacatcggaggtcgaccccggatggtgtggtttactataactctattgtggtgcaggctccgtcccctggggatagcagtggctggcctgatggctatgaagacttggagtcaggcgataatggatttcctggagacggggatgaaggagaaactgcccccctgagccgagctggagtggtggtgtttaactgcagcttgcggcagctgaggaatcccagtggcttccagggccagctcgatggaaatgctaccttcaacatggagctgtataacacagacctctttctggtgccctccccaggggtcttctctgtggcagagaacgagcatgtttatgttgaggtgtctgtcaccaaggctgaccaagatctgggattcgccatccaaacctgctttctctctccatactccaacccagacagaatgtctgattacaccatcatcgagaacatctgtccgaaagacgactctgtgaagttctacagctccaagagagtgcactttcccatcccgcatgctgaggtggacaagaagcgcttcagcttcctgttcaagtctgtgttcaacacctccctgctcttcctgcactgcgagttgactctgtgctccaggaagaagggctccctgaagctgccgaggtgtgtgactcctgacgacgcctgcacttctctcgatgccaccatgatctggaccatgatgcagaataagaagacattcaccaagcccctggctgtggtcctccaggtagactataaagaaaatgttcccagcactaaggattccagtccaattcctcctcctcctccacagattttccatggcctggacacgctcaccgtgatgggcattgcatttgcagcatttgtgatcggagcgctcctgacgggggccttgtggtacatctactcccacacaggggagacagcacgaaggcagcaagtccctacctcgccgccagcctcggagaacagcagcgcggcccacagcatcggcagcactcagagtaccccctgctctagcagcagcacagcctaggtggacagacagacgcccgcccaccgcagccagggcagggcccgatgccagtgctgcgtgtccacagtcagaagtcttgatctgggctccctgtaaagaaagagtgaatttcagtatacagacagccagttctacccaccccttaccacggcccacataaatgtgaccctgggcatctgtcacacgaaagctaagctggtggccttccccaccagcccctcgcaggatgggggtttcaatgtgaaacatatgccagttttgttttgtttttttaatgctgctttgtccaggtgtccaaacatccatcatttggggtggtctgttttacagagtaaaggaggcggtgaagggacgtcagctagtgtgtagagccaaggggagacagctaggattctcgcctagctgaaccaaggtgtaaaatagaagacacgctccatatccagtctcgccctggatgcccccttctgacctgccacaccctacatggtcccctgtgtagcttgctagcctttgtggggaggggctgtcacttaccaccgcaacattcctctcttgggccaatgaacgctaattcctggtcctccatgcacgcacaccaactccaaaagtgccttagtcaagagcatttctcctttcaggcacacagaaactgaaaacggtcgagagagtgggatatcggatttgtgcctgtctccggcattccgtcctaacaatatttaaatatcaggctggtagggttcggtggtcagcgaggggattagcagggtgatgcctgtgtgtggccatatgggcacaaatgcagaacacattgtggggacgatcacttcccccttaaatatggtctatccttccagagttggaacttaagttatatgtggtaggctatattgactccaaattcatcagcctctctgatgggcctgtataaaaacctggagaggcccaggccatctgatgatgtcacctgtcctgccccgaggatgcagagactgggagaagggcgctgactttaaaaagggtttcaggtgaacttct

SEQ ID NO: 12960 - protein, 853 aa, Rattus norvegicus
  ref <308>: DATABASE ACCESSION NUMBER: SWISS-Prot / AAA40813
  ref <309>: DATABASE ENTRY DATE: 2002-06-15
MAVTSHHMIPVMVVLMSACLATAGPEPSTRCELSPINASHPVQALMESFTVLSGCASRGTTGLPREVHVLNLRSTDQGPGQRQREVTLHLNPIASVHTHHKPIVFLLNSPQPLVWHLKTERLAAGVPRLFLVSEGSVVQFPSGNFSLTAETEERNFPQENEHLLRWAQKEYGAVTSFTELKIARNIYIKVGEDQVFPPTCNIGKNFLSLNYLAEYLQPKAAEGCVLPSQPHEKEVHIIELITPSSNPYSAFQVDIIVDIRPAQEDPEVVKNLVLILKCKKSVNWVIKSFDVKGNLKVIAPNSIGFGKESERSMTMTKLVRDDIPSTQENLMKWALDNGYRPVTSYTMAPVANRFHLRLENNEEMRDEEVHTIPPELRILLDPDHPPALDNPLFPGEGSPNGGLPFPFPDIPRRGWKEGEDRIPRPKQPIVPSVQLLPDHREPEEVQGGVDIALSVKCDHEKMVVAVDKDSFQTNGYSGMELTLLDPSCKAKMNGTHFVLESPLNGCGTRHRRSTPDGVVYYNSIVVQAPSPGDSSGWPDGYEDLESGDNGFPGDGDEGETAPLSRAGVVVFNCSLRQLRNPSGFQGQLDGNATFNMELYNTDLFLVPSPGVFSVAENEHVYVEVSVTKADQDLGFAIQTCFLSPYSNPDRMSDYTIIENICPKDDSVKFYSSKRVHFPIPHAEVDKKRFSFLFKSVFNTSLLFLHCELTLCSRKKGSLKLPRCVTPDDACTSLDATMIWTMMQNKKTFTKPLAVVLQVDYKENVPSTKDSSPIPPPPPQIFHGLDTLTVMGIAFAAFVIGALLTGALWYIYSHTGETARRQQVPTSPPASENSSAAHSIGSTQSTPCSSSSTA

SEQ ID NO: 12961 - DNA, 4208 bp, Homo sapiens
  ref <308>: DATABASE ACCESSION NUMBER: Refseq / NM_003243
  ref <309>: DATABASE ENTRY DATE: 2002-11-05
tctttaagatttgtagctactaagaaagaaaggagctttttttccttgggccttcaaactgaaagaaccgcatgagcctgacggcgcatggtcttaacatcaggctgtgcaggaagaagctatctgcagatggatgccagcacacacaaggaagcagagctctggcaacattgagtcaaagcaaggacacaacatcagagggacggcagagaatccttgtgtgtagtctttggtggcagtttgaaaattgcaaggagggactttaagactacttctgatttgcaaagatggtctgtgctccgagcaggctaaagtgactggacgagacgcactgttggagaaataaaaatgacttcccattatgtgattgccatctttgccctgatgagcttctgtttagccactgcaggtccagagcctggtgcactgtgtgaactgtcacctgtcagtgcctcccatcctgtccaggccttgatggagagcttcactgttttgtcaggctgtgccagcagaggcacaactgggctgccacaggaggtgcatgtcctgaatctcgcactgcgccaggggcctggccagctacagagagaggtcacacttcacctgaatcccatctcctcagtccacatccaccacaagtctgttgtgttcctgctcaactccccacaccccctggtgtggcatctgaagacagagagacttgccactggggtctccagactgtttttggtgtctgagggttctgtggtccagttttcatcagcaaacttctccttgacagcagaaacagaagaaaggaacttcccccatggaaatgaacatctgttaaattgggcccgaaaagagtatggagcagttacttcattcaccgaactcaagatagcaagaaacatttatattaaagtgggggaagatcaagtgttccctccaaagtgcaacatagggaagaattttctctcactcaattaccttgctgagtaccttcaacccaaagcagcagaagggtgtgtgatgtccagccagccccagaatgaggaagtacacatcatcgagctaatcacccccaactctaacccctacagtgctttccaggtggatataacaattgatataagaccttctcaagaggatcttgaagtggtcaaaaatctcatcctgatcttgaagtgcaaaaagtctgtcaactgggtgatcaaatcttttgatgttaagggaagcctgaaaattattgctcctaacagtattggctttggaaaagagagtgaaagatctatgacaatgaccaaatcaataagagatgacattccttcaacccaagggaatctggtgaagtgggctttggacaatggctatagtccaataacttcatacacaatggctcctgtggcaatagtatttcatcttcggcttgaaaataatgaggagatgggagatgaggaagtccacactattcctcctgagctacggatcctgctggaccctggtgccctgcctgccctgcagaacccgcccatccggggaggggaaggccaaaatggaggccttccgtttcctttcccagatatttccaggagagtctggaatgaagagggagaagatgggctccctcggccaaaggaccctgtcattcccagcatacaactgtttcctggtctcagagagccagaagaggtgcaagggagcgtggatattgccctgtctgtcaaatgtgacaatgagaagatgatcgtggctgtagaaaaagattcttttcaggccagtggctactcggggatggacgtcaccctgttggatcctacctgcaaggccaagatgaatggcacacactttgttttggagtctcctctgaatggctgcggtactcggccccggtggtcagcccttgatggtgtggtctactataactccattgtgatacaggttccagcccttggggacagtagtggttggccagatggttatgaagatctggagtcaggtgataatggatttccgggagatatggatgaaggagatgcttccctgttcacccgacctgaaatcgtggtgtttaattgcagccttcagcaggtgaggaaccccagcagcttccaggaacagccccacggaaacatcaccttcaacatggagctatacaacactgacctctttttggtgccctcccagggcgtcttctctgtgccagagaatggacacgtttatgttgaggtatctgttactaaggctgaacaagaactgggatttgccatccaaacgtgctttatctctccatattcgaaccctgataggatgtctcattacaccattattgagaatatttgtcctaaagatgaatctgtgaaattctacagtcccaagagagtgcacttccctatcccgcaagctgacatggataagaagcgattcagctttgtcttcaagcctgtcttcaacacctcactgctctttctacagtgtgagctgacgctgtgtacgaagatggagaagcacccccagaagttgcctaagtgtgtgcctcctgacgaagcctgcacctcgctggacgcctcgataatctgggccatgatgcagaataagaagacgttcaccaagccccttgctgtgatccaccatgaagcagaatctaaagaaaaaggtccaagcatgaaggaaccaaatccaatttctccaccaattttccatggtctggacaccctaaccgtgatgggcattgcgtttgcagcctttgtgatcggagcactcctgacgggggccttgtggtacatctattctcacacaggggagacagcaggaaggcagcaagtccccacctccccgccagcctcggaaaacagcagtgctgcccacagcatcggcagcacgcagagcacgccttgctccagcagcagcacggcctagcccaacccaggcccaacccggcccaacccagcccagcccagctcagctcagctactccaagggcaggaccaatggctgagcctcgtgtccagactcagagggctggattttggttcccttgtaaagacagagtgaatttcagtataaagatcacccgttgtattcaccccacacccagggctagtataaacatgaccctgggcttctgtaccacactagaattcatgtgagaaagctaaaatggtggtcttctccaccagcccctcacaggcttgggggttttctatgtgaaacacatgccagtttttaaaatgctgctttgtccaggtgagaacatccataatttggggccctgagttttacccagactcaaggagttggtaaagggttaatagccagatagtagaaccagtgaggagatgcggccaaagattctttatatctgaaccaagatgtaaaacaagaaatgctttgaggctttctaagcgatcctcctgtctaatttgcacctttgtctggatgcactcttctgaccttgctgccacaacctgtggggtctgatgtgtcccaagatgggtgctgccctcagggactgcaccctgacaagtgttaaggcaacattccttgcttgtgccctgggccaaaaccaatgctgatgaccttatcagcttcctgtttcttcccatactgcatacaccactgcaaaatgtcttaatgcaaattttgtatttcttacaggcctacagaaattgaaaatgaccaaaatcaggaaccacagatttgtgcccattcctaatattttgttctgcaaattaatgtataatttgaggtgaaattcagttataaagtcaaggacgaatttgcacagtgatatatttctatgtgtatgcaagtacaagtatataatatgtcacctggcacattcattttctcagttgaagaagagaaaatttgaaaatgtccttatgcttttagagttgcaacttaagtatatttggtagggtgagtgtttccactcaaaatatgtcaacttaaaaaaaaataggccctttcataaaaaccaaactgtagcaagatgcaaatgcatggcaaatctgtcggtctccagttggttatctgaatagtgtcaccaattccaccaagacagtgctgagattggaaagggcactcatttggattgccttacttctcttgccttaaatatatcccatatatttaatatgtcaaaaagggcttgaggtgaatttcattaaatggaataatatgatgccactttgcagctaaaataagctcagtgatacctccttgtt

SEQ ID NO: 12962 - protein, 849 aa, Homo sapiens
  ref <308>: DATABASE ACCESSION NUMBER: Refseq / NP_003234
  ref <309>: DATABASE ENTRY DATE: 2002-11-05
MTSHYVIAIFALMSFCLATAGPEPGALCELSPVSASHPVQALMESFTVLSGCASRGTTGLPQEVHVLNLALRQGPGQLQREVTLHLNPISSVHIHHKSVVFLLNSPHPLVWHLKTERLATGVSRLFLVSEGSVVQFSSANFSLTAETEERNFPHGNEHLLNWARKEYGAVTSFTELKIARNIYIKVGEDQVFPPKCNIGKNFLSLNYLAEYLQPKAAEGCVMSSQPQNEEVHIIELITPNSNPYSAFQVDITIDIRPSQEDLEVVKNLILILKCKKSVNWVIKSFDVKGSLKIIAPNSIGFGKESERSMTMTKSIRDDIPSTQGNLVKWALDNGYSPITSYTMAPVAIVFHLRLENNEEMGDEEVHTIPPELRILLDPGALPALQNPPIRGGEGQNGGLPFPFPDISRRVWNEEGEDGLPRPKDPVIPSIQLFPGLREPEEVQGSVDIALSVKCDNEKMIVAVEKDSFQASGYSGMDVTLLDPTCKAKMNGTHFVLESPLNGCGTRPRWSALDGVVYYNSIVIQVPALGDSSGWPDGYEDLESGDNGFPGDMDEGDASLFTRPEIVVFNCSLQQVRNPSSFQEQPHGNITFNMELYNTDLFLVPSQGVFSVPENGHVYVEVSVTKAEQELGFAIQTCFISPYSNPDRMSHYTIIENICPKDESVKFYSPKRVHFPIPQADMDKKRFSFVFKPVFNTSLLFLQCELTLCTKMEKHPQKLPKCVPPDEACTSLDASIIWAMMQNKKTFTKPLAVIHHEAESKEKGPSMKEPNPISPPIFHGLDTLTVMGIAFAAFVIGALLTGALWYIYSHTGETAGRQQVPTSPPASENSSAAHSIGSTQSTPCSSSSTA

SEQ ID NO: 12963 - DNA, 1176 bp, Rattus norvegicus
  ref <308>: DATABASE ACCESSION NUMBER: EMBL / M77850
  ref <309>: DATABASE ENTRY DATE: 2000-03-04
cggtcccggaagccggaacccgtagcttgtgggtctttggtctgaagaccatgaacgcggcggttggccttcggcgccgcgcgcgattgtcgcgcctcgtgtccttcagcgcgagccaccggctgcacagcccatctctgagtgctgaggagaacttgaaagtgtttgggaaatgcaacaatccgaatggccatgggcacaactataaagttgtggtgacaattcatggagagatcgatccggttacaggaatggttatgaatttgactgacctcaaagaatacatggaggaggccattatgaagccccttgatcacaagaacctggatctggatgtgccatactttgcagatgttgtaagcacgacagaaaatgtagctgtctatatctgggagaacctgcagagacttcttccagtgggagctctctataaagtaaaagtgtatgaaactgacaacaacattgtggtctacaaaggagaatagatcttaggtttaatattgtagaaaagctaatttcttttcttactagaaaaagctctttgtccttttaaagtacacagcagtcatcacctacccgtgtctccatgttgtgttctggtgtgcctgagcgttaaagggattgtgaggtctgtatgtaaatgcattaagaagcaaattcgaagtgcatcctgagtgtattcttggtgagaaagcaggggagaactgaggattgaagcccgggcctcacacatgtgaaacatatactctgctccgacatgcatcccagtccgccaaggccgtttagaggatctttacctagagatagagattgttttatcttcagctggagagacagctcagtggttaggagcactgactgcttctccagaggtcctgagttcaaatccaccagacggtggtggctcacaaccatctgtaatgggatccgatgctctcttctggtgtgtaggtgtacatacagacaaagcattcctacatttaagaaaatacataaataagtttcaaaaattatttcatctggggctggggatttagctcagtggtagagcgcttacctaggaagcgcaaggccctgggttcggtccccagctccgaaaaaaagaaccaaaaaaaaaaaaattatttcatctgagcaaaatgttttgatgtggaattatgtaaaggtaaaataaac

SEQ ID NO: 12964 - protein, 144 aa, Rattus norvegicus
  ref <308>: DATABASE ACCESSION NUMBER: SWISS-Prot / AAA40625
  ref <309>: DATABASE ENTRY DATE: 2002-06-15
MNAAVGLRRRARLSRLVSFSASHRLHSPSLSAEENLKVFGKCNNPNGHGHNYKVVVTIHGEIDPVTGMVMNLTDLKEYMEEAIMKPLDHKNLDLDVPYFADVVSTTENVAVYIWENLQRLLPVGALYKVKVYETDNNIVVYKGE

SEQ ID NO: 12965 - DNA, 921 bp, Homo sapiens
  ref <308>: DATABASE ACCESSION NUMBER: Refseq / NM_000317
  ref <309>: DATABASE ENTRY DATE: 2002-11-05
gtgggaggaggcaccggccgcgcggcgggaggaggtgccggccgagcaccgcagacagcgccgggaagatgagcacggaaggtggtggccgtcgctgccaggcacaagtgtcccgccgcatctccttcagcgcgagccaccgattgtacagtaaatttctaagtgatgaagaaaacttgaaactgtttgggaaatgcaacaatccaaatggccatgggcacaattataaagttgtggtgacagtacatggagagattgaccctgctacgggaatggttatgaatctggctgatctcaaaaaatatatggaggaggcgattatgcagccccttgatcataagaatctggatatggatgtgccatactttgcagatgtggtgagcacgactgaaaatgtagctgtttatatctgggacaacctccagaaagttcttcctgtaggagttctttataaagtaaaagtatacgaaactgacaataatattgtggtttataaaggagaatagctattggggttagcattgcacaaagcccagtttctttctgtgtttgaaaaagattttgatccccttggaatattaagaggtcaacacgtgattgttgtacgtacacattgtgctctggagtgcctatttattgaaatcattgtaagacctgttataaatttaagtctatttaaaactaaacttgtaatatacatcctgaaaatcatttagagagtcttttatttataaattaaaaatcacttcattttcacaaaatgttttggtgtgggattatttgaaagcaaaagaaatctaattttgttttctccattacctcattttagtattaatttttacttggtataatatacatggttaaaatgcttatgtgacttcgagtaggtgaatcttaaagaaataaaattcaagtgaccac

SEQ ID NO: 12966 - protein, 145 aa, Homo sapiens
  ref <308>: DATABASE ACCESSION NUMBER: Refseq / NP_000308
  ref <309>: DATABASE ENTRY DATE: 2002-11-05
MSTEGGGRRCQAQVSRRISFSASHRLYSKFLSDEENLKLFGKCNNPNGHGHNYKVVVTVHGEIDPATGMVMNLADLKKYMEEAIMQPLDHKNLDMDVPYFADVVSTTENVAVYIWDNLQKVLPVGVLYKVKVYETDNNIVVYKGE

SEQ ID NO: 12967 - DNA, 4008 bp, Rattus norvegicus
  ref <308>: DATABASE ACCESSION NUMBER: EMBL / M80550
  ref <309>: DATABASE ENTRY DATE: 2000-03-04
cccgggcagcgcgctctgcggtcgcctaccgcctgccgcccccgcgccgccgcgacgtggcaggaggcgatgcggcggcgccgctacctgcgggaccgcgccgaggcggcggcggcagcggcggcgggaggcggagaggggctgcagcggtcccgggactggctctacgagtcctactactgcatgagccagcagcacccgctcatcgtcttcctgctgctcatcgtcatgggcgcctgcctcgccctgctagccgtcttcttcgcgctcgggctggaggtggaagaccatgtggcatttttaataacggttcccactgccctggccattttctttgccatattcattcttgtctgcatagagtctgtgttcaagaagctactccgtgtgttttcgctggtgatttggatatgtctggttgccatgggatacctgttcatgtgcttcggagggactgtgtctgcctgggaccaggtgtcattcttcctcttcatcatctttgtggtatataccatgcttcccttcaacatgcgagatgccatcattgccagcatcctcacatcttcatctcatacgatagtgctgagcgtctacctgtctgcaacaccaggggccaaggagcacctgttctggcagatactggccaatgtgatcattttcatttgtgggaacttggcgggagcctaccacaagcacctcatggagcttgccttgcagcaaacctatcgggacacgtgtaattgcatcaagtcccggatcaagctggaatttgaaaaacggcagcaggaacggctcctgctctccttgctgccagctcacatcgccatggagatgaaagctgaaatcattcagaggctgcagggccccaaagcaggacagatggaaaacacaaacaacttccacaatctgtatgtcaaacgacacaccaacgtgagcatattatacgctgacattgttggcttcacccgccttgcaagcgattgctcccctggcgaactggtccacatgctgaatgaactctttgggaagtttgatcaaatagcaaaggagaatgaatgcatgagaattaaaattttaggagactgctattactgtgtttccgggctccctatatcactccctaaccatgccaagaactgtgtgaaaatgggattggatatgtgcgaagccataaagaaagtgagggatgctaccggagttgatatcaacatgcgtgtaggagtgcattctgggaacgttctctgtggtgtgattggtctccagaagtggcagtatgatgtgtggtctcatgatgttactctggcaaaccacatggaagctggaggagtccctgggcgtgttcacatttcttcagtcactctggagcacttgaatggggcttataaagtggaggaaggagatggtgagataagagacccatatttaaagcagcacttggtgaaaacctactttgtaatcaatcccaagggagagcgacggagtcctcagcatctcttcagacctcgacacactctggacggagccaagatgagagcatctgtccgcatgacccggtacttggagtcctggggagcagccaagccattcgcacatctgcaccacagagatagcatgaccacagagaatgggaagattagtaccacggatgtgccaatgggtcaacataattttcaaaatcgcaccttaagaactaagtcacagaagaagagatttgaagaagaactgaatgaaaggatgatccaagcaattgatgggatcaatgcacagaagcaatggctcaagtcagaagacattcaaagaatctccctgcttttctataacaagaatatagagaaagaataccgagctactgcactgccagcattcaagtactacgtgacctgtgcctgcctcatctttctctgcatcttcattgtacagatacttgtattgccaaaaacgtccatccttggcttctcctttggagctgcatttctctccctcatcttcatcctctttgtctgcttcgctggacagcttttgcaatgcagcaaaaaggcctccacctctctcatgtggcttttgaaatcatcaggcatcatcgccaaccgcccatggccacggatctccctcacaatcgtcaccacggctatcatactaaccatggctgtgttcaacatgtttttcctgagcaactctgaggagacaacccttcccactgccaatacatcaaatgcaaacgtttctgtcccggataaccaggcgtcgattcttcatgctcgaaacttgtttttcctcccgtacttcatatacagctgcatcctgggcttgatctcctgctccgttttcctgagggtgaactatgagttaaaaatgttaatcatgatggtggcactcgtgggctacaacaccattctactccacacccatgcccatgttctggatgcgtacagccaggtcctgtttcagagaccaggcatttggaaagacctgaagaccatgggctccgtgtcactctccatattcttcatcacgctgctggttctgggcagacagagtgaatattactgtaggttagacttcttgtggaagaacaagttcaaaaaagagcgggaggagatagaaaccatggagaacctaaatcgagtgctgctggagaacgtgcttcctgcacacgtggctgaacacttcctggccaggagcctgaaaaatgaggagctgtaccaccagtcctacgactgtgtctgtgtcatgtttgcctccattccggacttcaaggagttctacacagagtcagatgtgaacaaggaaggcttggaatgcctgcggctcctgaatgagatcattgctgactttgatgatctgctttctaagccaaagttcagtggtgttgaaaagatcaagaccattgggagcacatacatggcagccacgggactgagtgccatacccagccaggagcacgcccaggaacctgagcgtcagtacatgcacataggcaccatggtggagtttgcatatgccctggtgggaaaactggatgccatcaataagcactccttcaacgacttcaaactgcgagtgggtatcaaccatgggcctgtaatagctggcgtcataggggctcaaaagccacagtatgacatctggggcaacactgtcaacgtggccagcagaatggacagcaccggggtcctggacaaaatacaggtgactgaggagacaagcctcatcttgcagacgcttggctacacgtgtacatgtcgaggtatcatcaatgtgaaggggaaaggggacctgaagacatattttgtaaacacagagatgtcaaggtccctttctcagagcaacttggcatcctgagaagctgtctcttcctgacaagaagaatgtacttgcaggaaggtaccacgcactttctgactgcaacccttccccttcgtcctgatgtacgtgctctgccccatcctctggagcccctgcagactagttcctgtgacccagtgacatactgtttggtgtctgcgcgtgcccaggttgtcctgccacttgcactgtgcttgctcctaagcaggaggggaaggaaccatgtcctggaaggagagcattggaagaagtgatgaagaggtgaagtgaacacacattcttaaggcaataaaaccggggggtgtatattatcttctggtgcatgttcttctctggaaaatacggtagctcgtaactgcatccctagtctgatattcaaacacacagtatttgtgaataagctgatcccgtcacccaacatggagtctgtgttcacctacccatgtgtctcattgccagtggtcgtccttgggggctcagctgagactctcagcttctgtcaccttgctgtcctgtcttgtggcagcagcacgttgccatccatcaccagaattagtcctcacagcctaggaccagttttgtaccaaactcatctgatgttttgatgccatttgtcaaaagtaaggttaattcattaaaagttttatgtactttgaaaaaaaa

SEQ ID NO: 12968 - protein, 1090 aa, Rattus norvegicus
  ref <308>: DATABASE ACCESSION NUMBER: SWISS-Prot / AAA40682
  ref <309>: DATABASE ENTRY DATE: 2002-06-15
MRRRRYLRDRAEAAAAAAAGGGEGLQRSRDWLYESYYCMSQQHPLIVFLLLIVMGACLALLAVFFALGLEVEDHVAFLITVPTALAIFFAIFILVCIESVFKKLLRVFSLVIWICLVAMGYLFMCFGGTVSAWDQVSFFLFIIFVVYTMLPFNMRDAIIASILTSSSHTIVLSVYLSATPGAKEHLFWQILANVIIFICGNLAGAYHKHLMELALQQTYRDTCNCIKSRIKLEFEKRQQERLLLSLLPAHIAMEMKAEIIQRLQGPKAGQMENTNNFHNLYVKRHTNVSILYADIVGFTRLASDCSPGELVHMLNELFGKFDQIAKENECMRIKILGDCYYCVSGLPISLPNHAKNCVKMGLDMCEAIKKVRDATGVDINMRVGVHSGNVLCGVIGLQKWQYDVWSHDVTLANHMEAGGVPGRVHISSVTLEHLNGAYKVEEGDGEIRDPYLKQHLVKTYFVINPKGERRSPQHLFRPRHTLDGAKMRASVRMTRYLESWGAAKPFAHLHHRDSMTTENGKISTTDVPMGQHNFQNRTLRTKSQKKRFEEELNERMIQAIDGINAQKQWLKSEDIQRISLLFYNKNIEKEYRATALPAFKYYVTCACLIFLCIFIVQILVLPKTSILGFSFGAAFLSLIFILFVCFAGQLLQCSKKASTSLMWLLKSSGIIANRPWPRISLTIVTTAIILTMAVFNMFFLSNSEETTLPTANTSNANVSVPDNQASILHARNLFFLPYFIYSCILGLISCSVFLRVNYELKMLIMMVALVGYNTILLHTHAHVLDAYSQVLFQRPGIWKDLKTMGSVSLSIFFITLLVLGRQSEYYCRLDFLWKNKFKKEREEIETMENLNRVLLENVLPAHVAEHFLARSLKNEELYHQSYDCVCVMFASIPDFKEFYTESDVNKEGLECLRLLNEIIADFDDLLSKPKFSGVEKIKTIGSTYMAATGLSAIPSQEHAQEPERQYMHIGTMVEFAYALVGKLDAINKHSFNDFKLRVGINHGPVIAGVIGAQKPQYDIWGNTVNVASRMDSTGVLDKIQVTEETSLILQTLGYTCTCRGIINVKGKGDLKTYFVNTEMSRSLSQSNLAS

SEQ ID NO: 12969 - DNA, 5873 bp, Homo sapiens
  ref <308>: DATABASE ACCESSION NUMBER: EMBL / AB028983
  ref <309>: DATABASE ENTRY DATE: 1999-08-04
ggagcctaccataagcacctcatggaactcgctcttcagcaaacatatcaggacacctgtaattgcatcaagtcgcggatcaagttggaatttgaaaaacgtcaacaggagcggcttctgctctccctgctgccggcccacatcgccatggagatgaaagcggagatcatccagaggctgcagggccccaaggcgggccagatggagaacacaaataacttccacaacctgtatgtgaagcggcatacaaacgtgagcatcttatacgctgacatcgttggctttacccggctggcaagtgactgctccccgggagaactagtccacatgctgaatgagctctttggaaagtttgatcaaattgcaaaggagaatgaatgcatgagaattaaaattttaggagactgctactactgtgtatctggactccctatatctctccctaaccatgccaagaactgtgtgaaaatggggctggacatgtgtgaagccataaagaaagtgagggatgctactggagttgatatcaacatgcgcgtgggcgtgcattctgggaatgtcctgtgtggcgtgattggtctgcagaagtggcaatatgatgtgtggtcacatgatgtgaccttggccaaccacatggaagctggaggggtccctggacgtgttcacatttcttctgtcaccctggagcacttgaatggcgcttataaagtggaggagggagatggtgacattagggacccatatttaaaacagcacctggtgaaaacctactttgtgatcaaccccaagggagaacgacggagcccccagcatctcttcagacctcgccacacccttgatggagccaaaatgagggcctcggtccgcatgacccggtacttggagtcctggggggcagccaagccctttgcacacctacatcacagggacagcatgaccacagagaacggcaagatcagcaccacggatgtacccatgggtcagcataattttcaaaatcgcaccttaagaaccaagtcacaaaagaagagatttgaagaagaattgaatgaaaggatgattcaagcaattgatgggattaatgcacagaagcaatggctcaagtctgaagacattcagagaatctcactgcttttctataacaaagtactagaaaaagagtaccgggccacggcactgccagcgttcaagtattatgtgacttgtgcctgtctcatattcttctgcatcttcattgtgcagattctcgtgctgccaaaaacgtctgtcctgggcatctcctttggggctgcgtttctcttgctggccttcatcctcttcgtctgctttgctggacagcttctgcaatgcagcaaaaaagcctctcccctgctcatgtggcttttgaagtcctcgggcatcattgccaaccgcccctggccacggatctctctcacgatcatcaccacagccatcatattaatgatggccgtgttcaacatgtttttcctgagtgactcagaggaaacaatccctccaactgccaacacaacaaacacaagcttttcagcctcaaataatcaggtggcgattctgcgtgcgcagaatttatttttcctcccgtactttatctacagctgcattctgggactgatatcctgttccgtgttcctgcgggtaaactatgagctgaagatgttgatcatgatggtggccttggtgggctacaacaccatcctactccacacccacgcccacgtcctgggcgactacagccaggtcttatttgagagaccaggcatttggaaagacctgaagaccatgggctctgtgtctctctctatattcttcatcacactgcttgttctgggtagacagaatgaatattactgtaggttagacttcttatggaagaacaaattcaaaaaagagcgggaggagatagagaccatggagaacctgaaccgcgtgctgctggagaacgtgcttcccgcgcacgtggctgagcacttcctggccaggagcctgaagaatgaggagctataccaccagtcctatgactgcgtctgtgtcatgtttgcctccattccggatttcaaagaattttatacagaatccgacgtgaacaaggagggcttggaatgccttcggctcctgaacgagatcatcgctgactttgatgatcttctttccaagccaaaattcagtggagttgaaaagattaagaccattggcagcacatacatggcagcaacaggtctgagcgctgtgcccagccaggagcactcccaggagcccgagcggcagtacatgcacattggcaccatggtggagtttgcttttgccctggtagggaagctggatgccatcaacaagcactccttcaacgacttcaaattgcgagtgggtattaaccatggacctgtgatagctggtgtgattggagctcagaagccacaatatgatatctggggcaacactgtcaatgtggccagtaggatggacagcaccggagtcctggacaaaatacaggttaccgaggagacgagcctcgtcctgcagaccctcggatacacgtgcacctgtcgaggaataatcaacgtgaaaggaaagggggacctgaagacgtactttgtaaacacagaaatgtcaaggtccctttcccagagcaacgtggcatcctgaagagtcaccttcattttggcaagaagactgtattttcaggaaggtatcacacactttctgactgcaacttctgtcccttgtttttgatgtgcgtgctgtctgtcctatggagcctctgcagactcgttctcgtgacccagtggcataccgtttggtgtctgatgtgtgcccagatcgttctgccacttgcactgtgcttgctcctaagcaaaagggaaaaggagcgcgcgtgatagaagaaaagcactgggagaactaacagaggagaaaggtgaaacacacacacattcttaaggcaataaaactagggggtgtatattatcttctggtgcatgttcttttctggaaaatatggtagctcgccaaccgcatctgctcatctgatattcaaacacacagtattcgtgaataagttgattctgtcccccacgtggactctgtgctcacccattgtctcattgccagtggtgtccaagggcccccgttgggacccacggctctcgtccctctgctccgtgtgtctcatgccagcagcacgtcgccatccgtcaccagaattagtcctcacagcctaggaccagttttgtatcaaactcgtctgatgttttgatgccatttgtcttttgtaaagttaattcattaaaagttttatgtactttgatttacagtgcctgtatcttttattttcctgtcttctttctcctgtggtttgctccagaattaaggtttgttttccatccattctcccttttgacacagttgtttcagaaagagctctccagaagccaatattgagatgtaattcagattaggacacagtgtgtgacgcagataactggttactcagctccctggaaagcaggcaagcatgttgaatgtatctagtggtctgattttaatttgggcatctctagagaacgctttcagggaaaaatactttaatagtaaaaagattctctgcgagcaacagtgccccctccgtccactacgctcctgtctccaagaatgttttgctagagctaacagacatagactgcaaaagaataatttggaatcagctatgcaaatcagtctcacaatagcgtgagctaactgagagaagtactaagacccacaaactgcctgttaagtctgagaaggctaaagaagacacacagccaacgttcatgcatttttaaagacagaaggccttgaagaatttgttcttgtaaatccaacacaagttgtttggtacttttaacataaagaaatcatactttgccaaatagtgaaaagtagagcaatcgtgtataagctaatgtttaaaagcaaaactgcaaattgtagcccagttggtcaaacttgttttctttttataactcatggcaggcatctgtaagaagtagagaacccagatgatctcttaggaagccttttattcgtgggaactcgaacttgaagcacaagttcctggtttgaatcctggctctgattttttactggctgtgtgactttgaacacatctcttagtccctcttaggagtactttccttattggcaacttatggaatcgctagtgattaaacgaggcaatgactgtgagagagcctggcaggtgccccgtggtacattcacagcacgggcacagctgctgtgccaggactgtgactcattcccagtaaaaggcacttatcgaagctgataaccgtccttcatcaccgaagtgtgagtagagcatgacttatttagtattctgcctcaatggggaattttttgatcctgtaatcacaactcagcattggccttaatatacctaaatctccaaaaacagtgattaaagcaagagaattattacaagggcttttctctttcctctaactcattcttcacggatgccgtagcgtttccgtgagctcaaactggccttggtgtaaaatgtgtaaggatgagcagcaggcgtgcctcgtgggttcttcctctgttacatcctgctacactcatctgcaggtcaccttagttcacctaccctgagtgaacacccccagctgggtggtccaccaagttctcataaacagagtccctcccattcccccacggggtgcaccgaacttgggtttgcgctaaaaagaactcaaaaggagaactgtgctctcccaaagccatatcaccagtcttaccaaacaataggcttttaaaagcactgagtcattgtcagaatccactatgggaagctctgtgtgtacctggtcccttctaggtgtggtcccataggagcagccttagcatcccctgtgaacttatcaaaaatgcaaattctcaggccccaacctgaaggaggaccctgaatttgagatccccggggctggggcccagcacaactgctgtttagtgaacaggttctccaggtgattctgatccctgatcaagcttcagacctccctccctccccagtgtttttgcaggtgaggaaacaggggcagagtaattcaggcacatgtgttcagagttccacagttgattagcagttgaggccaggctagaatggaaaactgcctgttccttgaatctgaaagagcattattcctggtcaaagctccttaaagttctgggcagctaaaagcatccctgtgagcaaaaatgccaggcagaaaactggcagtgcacctctcatcagcccaggtcccagtgccattggcttcaagaaaaaaaaaaatctctccccaatgctctccttaacctttaagtcttacaggaagcctctcatagaaattgcctccagtccagtttcccaaaaaccccagtgttttacatatctgtttaggagtgtctaagttttgtcatcaatccacgatgttattcttccttcccaactcactgtgctcctaaaggcagcaaccattcatctttcctttgctctggatacaccgaatgaccaggtaacatcatcaggccgggtgcagtggctcctataatcccgatattttgggaggccgaggagagaggatcacttaagcccaggagtctgagaccagcctgggcaacatagcaagacccccatctctgcaaaaaaataagaaaattagcttggcatggtggcacgtgcctgtagtcccagctacatgggaggctgaggtgggaggatcacttgagcccaggaagtccagaacgtagtgagccttgattataccactgcactccagcctgggtgacagagcgagactctgtctcag

SEQ ID NO: 12970 - protein, 887 aa, Homo sapiens
  ref <308>: DATABASE ACCESSION NUMBER: SWISS-Prot / BAA83012
  ref <309>: DATABASE ENTRY DATE: 2002-06-15
GAYHKHLMELALQQTYQDTCNCIKSRIKLEFEKRQQERLLLSLLPAHIAMEMKAEIIQRLQGPKAGQMENTNNFHNLYVKRHTNVSILYADIVGFTRLASDCSPGELVHMLNELFGKFDQIAKENECMRIKILGDCYYCVSGLPISLPNHAKNCVKMGLDMCEAIKKVRDATGVDINMRVGVHSGNVLCGVIGLQKWQYDVWSHDVTLANHMEAGGVPGRVHISSVTLEHLNGAYKVEEGDGDIRDPYLKQHLVKTYFVINPKGERRSPQHLFRPRHTLDGAKMRASVRMTRYLESWGAAKPFAHLHHRDSMTTENGKISTTDVPMGQHNFQNRTLRTKSQKKRFEEELNERMIQAIDGINAQKQWLKSEDIQRISLLFYNKVLEKEYRATALPAFKYYVTCACLIFFCIFIVQILVLPKTSVLGISFGAAFLLLAFILFVCFAGQLLQCSKKASPLLMWLLKSSGIIANRPWPRISLTIITTAIILMMAVFNMFFLSDSEETIPPTANTTNTSFSASNNQVAILRAQNLFFLPYFIYSCILGLISCSVFLRVNYELKMLIMMVALVGYNTILLHTHAHVLGDYSQVLFERPGIWKDLKTMGSVSLSIFFITLLVLGRQNEYYCRLDFLWKNKFKKEREEIETMENLNRVLLENVLPAHVAEHFLARSLKNEELYHQSYDCVCVMFASIPDFKEFYTESDVNKEGLECLRLLNEIIADFDDLLSKPKFSGVEKIKTIGSTYMAATGLSAVPSQEHSQEPERQYMHIGTMVEFAFALVGKLDAINKHSFNDFKLRVGINHGPVIAGVIGAQKPQYDIWGNTVNVASRMDSTGVLDKIQVTEETSLVLQTLGYTCTCRGIINVKGKGDLKTYFVNTEMSRSLSQSNVAS

SEQ ID NO: 12971 - DNA, 2775 bp, Rattus norvegicus
  ref <308>: DATABASE ACCESSION NUMBER: EMBL / M81784
  ref <309>: DATABASE ENTRY DATE: 2000-03-04
gaattcagggcaccaggaggcggaggcgggacggtcaggggtccgagagcgcagtacagcggcccgagggcaaagtttgccagcagccccggcaggccaagcagctcccacgcgccacttgctgccccctctagcattctcaccccagcatcgctgcgccgggggacagagctgcggcccggctagctccgaggcggggacgccgcgacgggaacttaagcccaagagggatgtgaagcctcaaaatgaccctgttaccaggagacaactcggactatgactatagtgctctaagttgtgcctcagacacctccttccacccagccttcttcccacagcgccaggccatcaaaggcgtcttctaccgcagggcccaacggttgggaccgcaggacgacctgcaccagagcatctcacttggggaccgcaggcgacagatcatcatcaacgtgggtgggatcaagtactcactaccttggaccacactggatgagttccccctgacgcggctgggccagctcaaggcctgcaccaacttcgacgacatcctgagcgtgtgtgatgactatgacgtaacctgcaacgagttcttcttcgaccgcaacccgggggcctttggcaccatcctcaccttcctgcgggccggcaagctgcgcctgcttcgggagatgtgcgccctgtccttccaggaggagctgctgtactggggcattgcggaggaccacctggacggctgctgcaagcgccggtacctgcagaaaatcgaggagtttgctgagatgatggagagggaggatgaggaggaggcgctggacagcgaggatcaagagagtgagggtccatccaccagcgagggtcgcctgagccgctgcatgaggaggctgcgtgacatggtggagaagccacactcagggttgcctggcaaggtgtttgcctgcctgtctgttctgtttgtcaccgtcaccgctgtcaacctgtctgtcagcaccctgcccagcctgcgtgaggaggaggaacagggccagtgttcccaaatgtgccacaacgtcttcatcgtagagtcggtgtgcgtgggctggttctcccttgagttcctgctgcggttcatccaggcacccagcaagttcgccttcctgcggagcccgctgaccctcatcgatctggtggccatcctgccttactacgtcacactgctggtggatggcgctgcctccagccgccgcaagccaagcaccggcaacagctacctggacaaggttgggctggtgctgcgcgtgctgcgggcgctgcgcatcctctacgtgatgcgcctggcccggcattccctggggctgcagaccctgggcctcaccgcacgccgctgcacgcgtgaattcgggcttctgctgcttttcctgtgtgtggccatcgctctctttgccccactgctctacgtcatcgagaatgagatggcagacagccccgaattcaccagcatcccggcctgctactggtgggctgtcatcaccatgacaaccgtgggctacggagacatggtaccccggagcacgccgggccaggtggtggctctgagcagcatcctcagcggcatcctcctcatggccttcccggtcacctccatcttccatactttctcccgctcttacctggaactcaagcaggaacaagaacgggtgctgatccgccgggcccagtacctcatcaaaaccaagtctcagctcagtggcatgtcccaagacagtgacatcttgtttggaagtgcctcttcagacactagggacaacaactgaggcgagaagatgccccctaccctgcctgccagctgcggcttcatgcattcaccgccactggagcctggaaaaggacttagcgctttcaagtccagccctggcctgggactgacctgagcgagccacggcacagaaaggatatatgccacatctccaagagtccccgccctccctctaagcccagaagtaacagggaagctagctcgagccagtgcctcaccgacctggcttctcggttgcttctcttccctaagaagctgaccggccccatcccaccatgtaaagaacttgtgcagcaaagttctttgcgcactgagagactgcctggcggaaaacacatccggcagccacatgtgactttagtgtacatccacggaaggaagaaaaagcctgccactgggactttcaagaaaggatctgtgtctcttagtgaaaggaccacggtgatggggtcccggggctggtgggacaatggcatgatgggagagaagcaaacagacagacctttaaggagcccaccaccggacgctgttcaggctcctcctgctcctgcctcctgggctcctccttcatgcttcttcctgctcacactctccacagccttttatgcttgagggctctcttttcagactccactcatcccagccggggtgggggacaccaacaagccggtcatctctgctgtttcaaaggtgaaatcgcttcattccatggtttaaaattagtgagattttagcctactccaattattttagtatgaagaagaagaagaagaagaaggaggaggaggaggaggaggaggaggaggaagaggaggaggaggaagaggaggaggaggaggaggaggaggaggaagaggaggaggaggaggaggaggaggaggagaagaagaagaagaagaagaagaagaaaaaaaaaaaaaaagaaaaaaaaaaaaaaaaaaaaaaaaaaaaaaaaaaacggcggagcggccgccacgggtacc

SEQ ID NO: 12972 - DNA, 1186 bp, Rattus norvegicus; identical to SEQ ID NO: 3953
  ref <308>: DATABASE ACCESSION NUMBER: EMBL / M83107
  ref <309>: DATABASE ENTRY DATE: 2000-03-04

SEQ ID NO: 12973 - protein, 200 aa, Rattus norvegicus; identical to SEQ ID NO: 3954
  ref <308>: DATABASE ACCESSION NUMBER: SWISS-Prot / AAA40762
  ref <309>: DATABASE ENTRY DATE: 2001-10-16

SEQ ID NO: 12974 - DNA, 1082 bp, Homo sapiens; identical to SEQ ID NO: 3955
  ref <308>: DATABASE ACCESSION NUMBER: Refseq / XM_006432
  ref <309>: DATABASE ENTRY DATE: 2002-08-01

SEQ ID NO: 12975 - protein, 201 aa, Homo sapiens; identical to SEQ ID NO: 3956
  ref <308>: DATABASE ACCESSION NUMBER: Refseq / XP_006432
  ref <309>: DATABASE ENTRY DATE: 2002-08-01

SEQ ID NO: 12976 - DNA, 797 bp, Rattus norvegicus
  ref <308>: DATABASE ACCESSION NUMBER: EMBL / M83567
  ref <309>: DATABASE ENTRY DATE: 2000-03-04
ccgtttctccaagatgctggtggtcctgttcacagcggtcttgttgaccctgagctatgctcaggaagcaggtgatgaacttcagatcttagaccagacaccaaatcagaaaccacctccaccaggattcccaccaagaccacctgctaatgggagccagcaaggcccacccccacaaggaggcccacaacagagccccctgcagcctggaaagccccaagacccacccccacaaggaagcccacagcagaaaccacctcagcctggaaagccccaaggcccacccccaccaggaggcccacagaagaaaccccctcagcctggaaagccccaaggcccacccccaccaggaggcccacagaagaaaccccctcaacctggaaagccccaaggcccacccccaccaggaggccctcagcagaaaccccctcagcctggaaagccccaaggcccacccccaccaggaggccctcagcagaaaccccctcagcctgggaaccaacaaggcccacccccaccaggaggcccacagcagaaaccacctcagcctggaaagccccaaggcccacccccaccaggaggcccacagcagagacttcctcagcctggaaaccagcaaagcccaccacaaggtccccaattcggcagaccacagggatctttccagagtttgggtcctcagtaaaccagaagcctctgaaagaaagtgagtaagaagttctctccctcctgtttttctactgtcacggcagggtcagaactggagattcacaacattaataaaatgatcaacctgc

SEQ ID NO: 12977 - protein, 164 aa, Rattus norvegicus
  ref <308>: DATABASE ACCESSION NUMBER: Refseq / NP_036764
  ref <309>: DATABASE ENTRY DATE: 2000-11-01
MLVVLFTAVLLTLSYAQEAELQSLDQTPNQKPPPPGFPPRPPANGSQQGPPPQGGPQQKPPQPGKPQGPPPPGGPQQKPPQPGKPQGPPPPGGPQQKPPQPGNQQGPPPPGGPQQKPPQSGKPQGPPPPGGPQQRPPQPGNQQSPPQGPQFGRPQGSFQSLGPQ

SEQ ID NO: 12978 - DNA, 3129 bp, Rattus norvegicus
  ref <308>: DATABASE ACCESSION NUMBER: EMBL / M86835
  ref <309>: DATABASE ENTRY DATE: 2000-03-04
caccagccacagaccccgttgccgctcccggccgcttgccgccggctcagggcggaccatgcgccctccgagcccaccgcatgtccgctggctctgcgtgctggcaggagcccttgcctgcgccctcagacccgcgggcagccaggcagccagcccgcagcacgagtgtgagtacctgcagttgattgagatacagcgtcagcagtgcctggaggaggcccagctggagaatgaaaccacaggctgcagcaagatgtgggacaacctcacctgctggccgacaaccccgaggggccaggcggtagtcctggactgccccctcatctttcagctgtttgcccccattcatggttataacatcagccgtagctgcactgaagagggctggtcacaactggaaccaggcccctaccacattgcctgcggcctgaatgacagggcatcgagtctggatgagcagcaacagaccaagttctacaataccgtgaagaccggctacaccatcggctacagcttgtcccttgccagcctcctggttgccatggctatcttgagcctgttcaggaagctgcactgtacccgaaactacatccacatgcatctcttcatgtccttcatcctgagggccactgccgtcttcatcaaggacatggccctcttcaacagcggggagatagaccactgctctgaggcctcggtggggtgcaaggcagcggtggttttcttccagtattgtgtcatggccaacttcttctggctgctggtagagggcctctacctatacaccctgctggccgtctccttcttctccgagcggaagtacttctgggggtacattctcatcggctggggagtgcccagtgtgttcatcaccatatggacggtcgtcaggatatattttgaggatttcgggtgctgggacaccatcatcaactcctccctgtggtggatcataaaggcccccatcctcctctccatcctggtgaacttcgtcctgtttatctgcatcatccggatcctggttcagaaactacggccacccgacattgggaagaatgatagcagcccatattcgaggctggccaagtccacgcttctgctcatccccctgtttggaattcactatgtcatgtttgccttcttccccgacaacttcaaggcccaggtgaaaatggtcttcgaacttgtcgtgggctctttccagggtttcgtggtggccatcctctactgcttcctcaatggtgaggtgcaggcggagctgcggcggaagtggcggcgttggcatctgcagggcgtcctgggctggagctccaaatcccagcatccgtggggaggcagcaacggcgccacatgcagcacgcaggtatccatgctgacccgcgtcagcccgagcgcacgccgctcctccagcttccaagcggaggtctccctggtctgaccgccagaggccgccaggccccttcacaccctctccacaacggcccctggagcagaggtctgtagcgacaccgttggctccagcttttcatagggacacactcctttgccgcagccaggaccgggtctatgctagctggagagcggggagctctaaccttggaggatggtaggaggatccagcatcagactccacctcccaaggccattctgccagtcatgcgcacaaaatctgcatacacctggaaagcaaccgcttgccctcaaagctttggaactcgcggggcagaaggttccgcccgccctgtggtgcctagaatccactgggacgctcgtgtcgctttgggttaagcgttgccattgagactcctctctgaggatgcagccccctccctgcgtttatctgccagctcttctgggtgggtgagttcttctacctcaggcagatggttatgacctggagtttcagtttggggatcgcagctgtgttgtggtcctctctcaggatggaattgtcccagtgtatcctcagacctgggagctcagggacctacctctggggagggagaagacaaccccagtcagtgctcaccaagtgactttgtccaacaaataggaccagtcccactagccttatgtacaaccaaagcaatatcgagctgcctgctctgggcgctcatctacacacgccaaccactgctgcaagggtcagaggcatgaacacacaggccccttgatcctgaggtcaccctaacatcactggtagtgacacctgggtctcggtgagagtgggtatcctttcccgtggctagtgcgaacgtaaagactacctttttacatagtatgatctgctggattctcttggggttgtactaccacagatgctattgccccacagtccccagttcttgctgccttggagcgtgattatgtggctgacataaaagcccaggggtcaaggcatcttaagtcctcctccacccttaattcaacacggcttctaatccaagcagttgtcagcaggcccctgcagagctgcaccaggcttgtacgacaataaacgttggctctgacaggcttagttcccctggccactgtgggtctcctgcttctcctgagaagctgtgtcacctctgcagtggtgagaggtgacccactaaagctaccacccttcactcctcggacaggcaggagccacctacttccatgggaggacttatcccaagagcctttgattcacattcgagtgtgaagagattgtgacaggggttccgttgtgaccctctctcccctaaacccatctggaaggagacagatgctgcctccgaccgaatcaaaacagccaacggagctgtcacaaacagcaagggttcacgatcattcctgaaaacacagcaaagaggatatgcagccaccaggttgctgctgtctacgggccaaccaagagggtcgggtcagtggaggtttcccagtgtaagtcagtgaggagaggccatgtggctaagggaaaggagtagacacagcaatggggcaaagcaggtgacattggtcagagagaaagagagaaagagagagagagagcactcccaagggtttgtgcaaacacacttgtgtaaacttgtggagttgtcttgctgatgaagccagaagtgtatgctggtgtgaagaagccagaatgggctagcagggggg

SEQ ID NO: 12979 - protein, 459 aa, Rattus norvegicus
  ref <308>: DATABASE ACCESSION NUMBER: SWISS-Prot / AAA42331
  ref <309>: DATABASE ENTRY DATE: 2001-10-16
MRPPSPPHVRWLCVLAGALACALRPAGSQAASPQHECEYLQLIEIQRQQCLEEAQLENETTGCSKMWDNLTCWPTTPRGQAVVLDCPLIFQLFAPIHGYNISRSCTEEGWSQLEPGPYHIACGLNDRASSLDEQQQTKFYNTVKTGYTIGYSLSLASLLVAMAILSLFRKLHCTRNYIHMHLFMSFILRATAVFIKDMALFNSGEIDHCSEASVGCKAAVVFFQYCVMANFFWLLVEGLYLYTLLAVSFFSERKYFWGYILIGWGVPSVFITIWTVVRIYFEDFGCWDTIINSSLWWIIKAPILLSILVNFVLFICIIRILVQKLRPPDIGKNDSSPYSRLAKSTLLLIPLFGIHYVMFAFFPDNFKAQVKMVFELVVGSFQGFVVAILYCFLNGEVQAELRRKWRRWHLQGVLGWSSKSQHPWGGSNGATCSTQVSMLTRVSPSARRSSSFQAEVSLV

SEQ ID NO: 12980 - DNA, 2680 bp, Homo sapiens
cagggcagaccatgcgcccgccaagtccgctgcccgcccgctggctatgcgtgctggcaggcgccctcgcctgggcccttgggccggcgggcggccaggcggccaggctgcaggaggagtgtgactatgtgcagatgatcgaggtgcagcacaagcagtgcctggaggaggcccagctggagaatgagacaataggctgcagcaagatgtgggacaacctcacctgctggccagccacccctcggggccaggtagttgtcttggcctgtcccctcatcttcaagctcttctcctccattcaaggccgcaatgtaagccgcagctgcaccgacgaaggctggacgcacctggagcctggcccgtaccccattgcctgtggtttggatgacaaggcagcgagtttggatgagcagcagaccatgttctacggttctgtgaagaccggctacaccattggctacggcctgtccctcgccacccttctggtcgccacagctatcctgagcctgttcaggaagctccactgcacgcggaactacatccacatgcacctcttcatatccttcatcctgagggctgccgctgtcttcatcaaagacttggccctcttcgacagcggggagtcggaccagtgctccgagggctcggtgggctgtaaggcagccatggtctttttccaatattgtgtcatggctaacttcttctggctgctggtggagggcctctacctgtacaccctgcttgccgtctccttcttctctgagcggaagtacttctgggggtacatactcatcggctggggggtacccagcacattcaccatggtgtggaccatcgccaggatccattttgaggattatggtctgctcaggtgctgggacaccatcaactcctcactgtggtggatcataaagggccccatcctcacctccatcttggtaaacttcatcctgtttatttgcatcatccgaatcctgcttcagaaactgcggcccccagatatcaggaagagtgacagcagtccatactcaaggctagccaggtccacactcctgctgatccccctgtttggagtacactacatcatgttcgccttctttccggacaattttaagcctgaagtgaagatggtctttgagctcgtcgtggggtctttccagggttttgtggtggctatcctctactgcttcctcaatggtgaggtgcaggcggagctgaggcggaagtggcggcgctggcacctgcagggcgtcctgggctggaaccccaaataccggcacccgtcgggaggcagcaacggcgccacgtgcagcacgcaggtttccatgctgacccgcgtcagcccaggtgcccgccgctcctccagcttccaagccgaagtctccctggtctgaccaccaggatcccaggggcccaaggcggcccctcccgccccttcccactcaccccggcagacgccggggacagaggcctgcccgggcgcggccagccccggccctgggctcggaggctgcccccggccccctggtctctggtccggacactcctagagaacgcagccctagagcctgcctggagcgtttctagcaagtgagagagatgggagctcctctcctggaggattgcaggtggaactcagtcattagactcctcctccaaaggccccctacgccaatcaagggcaaaaagtctacatactttcatcctgactctgccccctgctggctcttctgcccaattggaggaaagcaaccggtggatcctcaaacaacactggtgtgacctgagggcagaaaggttctgcccgggaaggtcaccagcaccaacaccacggtagtgcctgaaatttcaccattgctgtcaagttcctttgggttaagcattaccactcaggcatttgactgaagatgcagctcactaccccattctctctttacgcttagctatcagcttttcaaagtgggttattctggagtttttgtttggagagcacacctatcttagtggttccccaccgaagtggactggcccctgggtcagtctggtgggaggacggtgcaacccaaggactgagggactctgaagcctctgggaaatgagaaggcagccaccagcgaatgctaggtctcagactaagcctacctgctctccaagtctcagtggcttcatctgtcaagtgggatctgtcacaccagccattcttatctctctgtgctgtggaagcaacaggaatcaagagctgccctccttgtccacccacctatgtgccaactgttgtaactaggctcagagatgtgcacccatgggctctgacagaaagcagatacctcaccctgctacacatacaggatttgaactcagatctgtctgataggaatgtgaaagcacagactcttactgctaacttttgtgtatcgtaaccagccagatcctcttggttatttgtttaccacttgtattattaatgccattatccctgaatcccccttgccaccccaccctccctggagtgtggctgaggaggcctccatctcatgtatcatctggataggagcctgctggtcacagcctcctctgtctgcccttcaccccagtggccactcagcttcctacccacacctctgccagaagatcccctcaggactgcaacaggcttgtgcaacaataaatgttggcttgg

SEQ ID NO: 12981 - protein, 460 aa, Homo sapiens
MRPPSPLPARWLCVLAGALAWALGPAGGQAARLQEECDYVQMIEVQHKQCLEEAQLENETIGCSKMWDNLTCWPATPRGQVVVLACPLIFKLFSSIQGRNVSRSCTDEGWTHLEPGPYPIACGLDDKAASLDEQQTMFYGSVKTGYTIGYGLSLATLLVATAILSLFRKLHCTRNYIHMHLFISFILRAAAVFIKDLALFDSGESDQCSEGSVGCKAAMVFFQYCVMANFFWLLVEGLYLYTLLAVSFFSERKYFWGYILIGWGVPSTFTMVWTIARIHFEDYGLLRCWDTINSSLWWIIKGPILTSILVNFILFICIIRILLQKLRPPDIRKSDSSPYSRLARSTLLLIPLFGVHYIMFAFFPDNFKPEVKMVFELVVGSFQGFVVAILYCFLNGEVQAELRRKWRRWHLQGVLGWNPKYRHPSGGSNGATCSTQVSMLTRVSPGARRSSSFQAEVSLV

SEQ ID NO: 12982 - DNA, 3295 bp, Rattus norvegicus; identical to SEQ ID NO: 4022
  ref <308>: DATABASE ACCESSION NUMBER: EMBL / M86912
  ref <309>: DATABASE ENTRY DATE: 2000-03-04

SEQ ID NO: 12983 - protein, 359 aa, Rattus norvegicus [sequence omitted]

SEQ ID NO: 12984 - DNA, 1563 bp, Homo sapiens; identical to SEQ ID NO: 4024
  ref <308>: DATABASE ACCESSION NUMBER: EMBL / D13814
  ref <309>: DATABASE ENTRY DATE: 1998-11-24

SEQ ID NO: 12985 - protein, 359 aa, Homo sapiens
  ref <308>: DATABASE ACCESSION NUMBER: SWISS-Prot / BAA02968
  ref <309>: DATABASE ENTRY DATE: 2001-10-16
MILNSSTEDGIKRIQDDCPKAGRHNYIFVMIPTLYSIIFVVGIFGNSLVVIVIYFYMKLKTVASVFLLNLALADLCFLLTLPLWAVYTAMEYRWPFGNYLCKIASASVSFNLYASVFLLTCLSIDRYLAIVHPMKSRLRRTMLVAKVTCIIIWLLAGLASLPAIIHRNVFFIENTNITVCAFHYESRNSTLPIGLGLTKNILGSCFPFLIILTSYTLIWKALKKAYEIQKNNPRNDDIFRIIMAIVLFFFFSWIPHQIFTFLDVLIQQGIIRDCRIADIVDTAMPITIWIAYFNNCLNPLFYGFLGKKFKKDILQLLKYIPPKAKSHSNLSTKMSTLSYRPSDNVSSSTKKPAPCFEVE

SEQ ID NO: 12986 - DNA, 404 bp, Rattus norvegicus
  ref <308>: DATABASE ACCESSION NUMBER: EMBL / M87786
  ref <309>: DATABASE ENTRY DATE: 2000-06-21
caggcttcctcatcaaaatgaagtggcctgttaggctgttggtgctgttcttctggattcctgcttccaggggtgatgttgtgatgacacaaactccagtctccctgcctgtcagccttggaggtcaagcctctatctcttgccggtcaagtcagagcctggtacacagtaatggaaacacctacttgcattggtacctgcagaagccaggccagtctccacagctcctcatctatcgggtttccaacagattttctggggtgccagacaggttcagtggcagtgggtcagggacagatttcaccctcaagatcagcagagtagagcctgaggacttgggagattattactgcttacaaagtacacattttccgtacacgtttggagctgggaccaagctggaa

SEQ ID NO: 12987 - DNA, 2997 bp, Rattus norvegicus
  ref <308>: DATABASE ACCESSION NUMBER: EMBL / M90310
  ref <309>: DATABASE ENTRY DATE: 2000-03-04
gagagtgactctggcagcgctggcatcagactggagacttgacagggttggagagaggcagcaggaccatggactccaggaacatgcttgtcgtttactctgtgaacttggagaaaaagctgaacgctgctgcccaccacacgattgagtaccaaactcagaagctcgtgctcaggcgtggacagatattctccctgaaggtgatgctaaacagaccgctccaatctcatgatgaactgaagctgatattcaatactggacacaacatgccattctacactgtggagcttgatccaatgacatcctaccgttccaagggctggcaggtgaagattgctaaacagtctggtgtagaggttgtattgaatgtcatcagtgctgccaacgccgtggtggggaggtacacgatgaacgtgaacgaatttgacgctggagtgttcttccttctcttgaatccgtggtgctcagatgacagtgtcttcatggctagtgaggaagaccgagcagagtacgtccttaatgataccggttacatgtacatgggttttgccaaacagattaaagagaagccctggacctttggtcgtttgagaagtacacttgaactgctgcttccgattgttgacccatttggagcccaaggaaatgcagagccagtgcttgtgtccagggccatttgtactatgatgtgtgctgcaaacaattttggagtgctggtggggaactggacaggagactatagcaatggcactgccccgtatgtgtgggccagcagtgtacccattctccagcagcactacatcaccaggatgcctgtacgctttggccagtgctgggttttctctggagtcctgaccacagcactgagagcagtgggcatcccagctcgcagcgtgactaactttgagtcagcccacgatacagaaaagaacctcagagtagacatctacctggatgaatcgggcaagacaattccacatctgaccaaagactctgtctggaatttccatatgtggacagatgcctggatgaaaagacaggatctaccccagggccatgatggttggcaggtcctggattctacaccacaggaaatcagtgaaggacaattccgcattggaccttcaccggtgtctgctatccgccagggattggtccaattcatgtatgacaccacatttgtgttcacggaggtgaacggtgacaagtacatctggctggtgaagcagaaccaggaaagagagagaagaatgtctcatcgctgtggagactgcgctagcatcggcaagaacatcagcaccaagatggtgggcgagaacaggcgtcaagatattaccttgcattacaagttcccagaaggcagcccagaggagaggaaggccatggagaaggcctctgggaaacgtcctgatgacaagctcaactctcggacacttcacatatctgtcctccagaactctgtggagctaggacatcctatcaatttgaccatagtgttgaaaaggaaaacggccacaccacagaatgtcaacatttcatgctcccttgacctacagacttacacaggcaacaagaagacaaacctgggagtcatccagaagactgtgcagattcaaggccaagaatcagaggtgtctctcagcatggattccagtttctacatctataaactgggcatggttgatgatgagatggtcattaaagggttcatcattgcagaaattgttgattctggtgaacgggtagccactgatacgaccctgtgtttcctgtactctgccttctctgtagagatgccgagcacaagcaaggtcaaccagcctctgaccatcacctgcaacttcaagaacaccctgcccatccctttgactaacatcaagttctcagtggaaagcctgggcctcaataacatgaagtcctgggagcaagagacggtgccgcccggaaagaccatcaatttccagatagaatgcaccccagtgaaaactgggaatcccaggaagttcattgtcaagtttatttccagacaagtgaaagaggttcatgccgagaaggtcgttctcatcacaaagtagcccatctgataccattgagatggaggcaggagccctgattggctctgagccttggtaagcatgttagcatttcctaaattgcatttagctctcaggtcagaaatgattaaattttaggggttggggatttagctcagtggtagagcgcttgcctaggaagcgcagggcctgagttccttcattttgggtagagctacttaggcccactgtatccattcctgtaggacttcataatgtgggccagcaggacattaccagggagagagggttgtggtctggtggacgttggtatctgccatgttttcttacttgaaagttactggttttgttctttatcctttgtaagtatacaggccttaaaggttttgtgtatgaggatatgagtgcatgtgtgagtttgcatgcacatgtgggtacttgtgtgtagaggtcagagattggtgtcacaggtctcccttaagtactgtggaagaatctttcacttaaatagagcttgtctaaatctgctaatctggctagctagtgtttcttccccccacacactggcgtcaccagcagataccacaagcttgtaactgtgttagcactggggtctggacctgggtccttaggtctgcatgcaaagtgctttgcctgctgagccatctccccaaccttcattttgatttttcaggtctggggattgcaactcatggcctcatatatactaggcaaggcctttatcactgacaccagaccctatcccctctccacagggattctaggaggggctctaccactgagccacgccctcagtgcctccatgggggattctaggcatgagttccaccattaaatgatacccctagtttctcactgatggatttcaggcaagtgccctcctgctgagttcgactttccagcccctaattagggggtagag

SEQ ID NO: 12988 - protein, 668 aa, Rattus norvegicus
  ref <308>: DATABASE ACCESSION NUMBER: SWISS-Prot / AAA42287
  ref <309>: DATABASE ENTRY DATE: 2002-06-15
MDSRNMLVVYSVNLEKKLNAAAHHTIEYQTQKLVLRRGQIFSLKVMLNRPLQSHDELKLIFNTGHNMPFYTVELDPMTSYRSKGWQVKIAKQSGVEVVLNVISAANAVVGRYTMNVNEFDAGVFFLLLNPWCSDDSVFMASEEDRAEYVLNDTGYMYMGFAKQIKEKPWTFGRLRSTLELLLPIVDPFGAQGNAEPVLVSRAICTMMCAANNFGVLVGNWTGDYSNGTAPYVWASSVPILQQHYITRMPVRFGQCWVFSGVLTTALRAVGIPARSVTNFESAHDTEKNLRVDIYLDESGKTIPHLTKDSVWNFHMWTDAWMKRQDLPQGHDGWQVLDSTPQEISEGQFRIGPSPVSAIRQGLVQFMYDTTFVFTEVNGDKYIWLVKQNQERERRMSHRCGDCASIGKNISTKMVGENRRQDITLHYKFPEGSPEERKAMEKASGKRPDDKLNSRTLHISVLQNSVELGHPINLTIVLKRKTATPQNVNISCSLDLQTYTGNKKTNLGVIQKTVQIQGQESEVSLSMDSSFYIYKLGMVDDEMVIKGFIIAEIVDSGERVATDTTLCFLYSAFSVEMPSTSKVNQPLTITCNFKNTLPIPLTNIKFSVESLGLNNMKSWEQETVPPGKTINFQIECTPVKTGNPRKFIVKFISRQVKEVHAEKVVLITK

SEQ ID NO: 12989 - DNA, 2983 bp, Homo sapiens
  ref <308>: DATABASE ACCESSION NUMBER: Refseq / NM_003241
  ref <309>: DATABASE ENTRY DATE: 2000-10-31
agagatagagtcttccctggcattgcaggagagaatctgaagggatgatggatgcatcaaaagagctgcaagttctccacattgacttcttgaatcaggacaacgccgtttctcaccacacatgggagttccaaacgagcagtcctgtgttccggcgaggacaggtgtttcacctgcggctggtgctgaaccagcccctacaatcctaccaccaactgaaactggaattcagcacagggccgaatcctagcatcgccaaacacaccctggtggtgctcgacccgaggacgccctcagaccactacaactggcaggcaacccttcaaaatgagtctggcaaagaggtcacagtggctgtcaccagttcccccaatgccatcctgggcaagtaccaactaaacgtgaaaactggaaaccacatccttaagtctgaagaaaacatcctataccttctcttcaacccatggtgtaaagaggacatggttttcatgcctgatgaggacgagcgcaaagagtacatcctcaatgacacgggctgccattacgtgggggctgccagaagtatcaaatgcaaaccctggaactttggtcagtttgagaaaaatgtcctggactgctgcatttccctgctgactgagagctccctcaagcccacagataggagggaccccgtgctggtgtgcagggccatgtgtgctatgatgagctttgagaaaggccagggcgtgctcattgggaattggactggggactatgaaggtggcacagccccatacaagtggacaggcagtgccccgatcctgcagcagtactacaacacgaagcaggctgtgtgctttggccagtgctgggtgtttgctgggatcctgactacagtgctgagagcgttgggcatcccagcacgcagtgtgacaggcttcgattcagctcacgacacagaaaggaacctcacggtggacacctatgtgaatgagaatggcaagaaaatcaccagtatgacccacgactctgtctggaatttccatgtgtggacggatgcctggatgaagcgaccggatctgcccaagggctacgacggctggcaggctgtggacgcaacgccgcaggagcgaagccagggtgtcttctgctgtgggccatcaccactgaccgccatccgcaaaggtgacatctttattgtctatgacaccagattcgtcttctcagaagtgaatggtgacaggctcatctggttggtgaagatggtgaatgggcaggaggagttacacgtaatttcaatggagaccacaagcatcgggaaaaacatcagcaccaaggcagtgggccaagacaggcggagagatatcacctatgagtacaagtatccagaaggctcctctgaggagaggcaggtcatggatcatgccttcctccttctcagttctgagagggagcacagacgacctgtaaaagagaactttcttcacatgtcggtacaatcagatgatgtgctgctgggaaactctgttaatttcaccgtgattcttaaaaggaagaccgctgccctacagaatgtcaacatcttgggctcctttgaactacagttgtacactggcaagaagatggcaaaactgtgtgacctcaataagacctcgcagatccaaggtcaagtatcagaagtgactctgaccttggactccaagacctacatcaacagcctggctatattagatgatgagccagttatcagaggtttcatcattgcggaaattgtggagtctaaggaaatcatggcctctgaagtattcacgtctttccagtaccctgagttctctatagagttgcctaacacaggcagaattggccagctacttgtctgcaattgtatcttcaagaataccctggccatccctttgactgacgtcaagttctctttggaaagcctgggcatctcctcactacagacctctgaccatgggacggtgcagcctggtgagaccatccaatcccaaataaaatgcaccccaataaaaactggacccaagaaatttatcgtcaagttaagttccaaacaagtgaaagagattaatgctcagaagattgttctcatcaccaagtagccttgtctgatgctgtggagccttagttgagatttcagcatttcctaccttgtgcttagctttcagattatggatgattaaatttgatgacttatatgagggcagattcaagagccagcaggtcaaaaaggccaacacaaccataagcagccagacccacaaggccaggtcctgtgctatcacagggtcacctcttttacagttagaaacaccagccgaggccacagaatcccatccctttcctgagtcatggcctcaaaaatcagggccaccattgtctcaattcaaatccatagatttcgaagccacagagtctctccctggagcagcagactatgggcagcccagtgctgccacctgctgacgacccttgagaagctgccatatcttcaggccatgggttcaccagccctgaaggcacctgtcaactggagtgctctctcagcactgggatgggcctgatagaagtgcattctcctcctattgcctccattctcctctctctatccctgaaatccaggaagtccctctcctggtgctccaagcagtttgaagcccaatctgcaaggacatttctcaagggccatgtggttttgcagacaaccctgtcctcaggcctgaactcaccatagagacccatgtcagcaaacggtgaccagcaaatcctcttcccttattctaaagctgccccttgggagactccagggagaaggcattgcttcctccctggtgtgaactctttctttggtattccatccactatcctggcaactcaaggctgcttctgttaactgaagcctgctccttcttgttctgccctccagagatttgctcaaatgatcaataagctttaaattaaactctacttcaagaaaaaaaaaccg

SEQ ID NO: 12990 - protein, 684 aa, Homo sapiens
  ref <308>: DATABASE ACCESSION NUMBER: Refseq / NP_003232
  ref <309>: DATABASE ENTRY DATE: 2000-10-31
MMDASKELQVLHIDFLNQDNAVSHHTWEFQTSSPVFRRGQVFHLRLVLNQPLQSYHQLKLEFSTGPNPSIAKHTLVVLDPRTPSDHYNWQATLQNESGKEVTVAVTSSPNAILGKYQLNVKTGNHILKSEENILYLLFNPWCKEDMVFMPDEDERKEYILNDTGCHYVGAARSIKCKPWNFGQFEKNVLDCCISLLTESSLKPTDRRDPVLVCRAMCAMMSFEKGQGVLIGNWTGDYEGGTAPYKWTGSAPILQQYYNTKQAVCFGQCWVFAGILTTVLRALGIPARSVTGFDSAHDTERNLTVDTYVNENGKKITSMTHDSVWNFHVWTDAWMKRPDLPKGYDGWQAVDATPQERSQGVFCCGPSPLTAIRKGDIFIVYDTRFVFSEVNGDRLIWLVKMVNGQEELHVISMETTSIGKNISTKAVGQDRRRDITYEYKYPEGSSEERQVMDHAFLLLSSEREHRRPVKENFLHMSVQSDDVLLGNSVNFTVILKRKTAALQNVNILGSFELQLYTGKKMAKLCDLNKTSQIQGQVSEVTLTLDSKTYINSLAILDDEPVIRGFIIAEIVESKEIMASEVFTSFQYPEFSIELPNTGRIGQLLVCNCIFKNTLAIPLTDVKFSLESLGISSLQTSDHGTVQPGETIQSQIKCTPIKTGPKKFIVKLSSKQVKEINAQKIVLITK

SEQ ID NO: 12991 - DNA, 4051 bp, Rattus norvegicus
  ref <308>: DATABASE ACCESSION NUMBER: EMBL / M92042
  ref <309>: DATABASE ENTRY DATE: 2000-03-04
gaattccaagacagaatatcagtcctccctccgtttcccaggtcagctccctagcctttaccctgtgggcccaacgtgaagagcgtgaagagcgcggcatgcagcaccccctggctggcccggtgtcttttgacctgctgttgactgctcccaggaggccctgacgccctggggcacttttgctctgcacaggaccacgttggggtttgccatggtgacataaaggggtgtagaggaaggaaggagcaagaccagcctgtagactgtgcccctggctgggcgaaagggccaggggcccggagccttctctccactgccctctgaacgtctcacttcctaagtctctgcatttctcagtcagtggacaacttttggaactcctgtgtgaggacttcgggggaccaggccaggctgggcctctgctggttgagatctcgggggccagaatgcctgccctggcgtgcctccggaggctgtgtcggcacctgtccccacaggctgtcctgttcctgctgtttgtcttctgcctgttcagcgtgtttgtctcggcctactacctatatggttggaaccggggcctcgagccctcggcagatgcttctgagtccgactgcggggacccaccacctgtcgcccctagccgtctcctgccaatcaagcctgtgcaggcggtcgccccttctcgaacagacccgctggtgctggtatttgtggagagcctctattcacagctgggccaggaggtggtggccatcctggaatccagtcgcttcaagtaccgaacagaaattgcaccggggaagggggacatgcccacactcacagacaagggccgaggccgcttcgccctcatcatctatgagaacatcctcaagtatgtcaacctggatgcctggaaccgggagctgctggacaagtactgtgtggcctacggcgtgggcatcattggcttcttcaaggccaatgagaacagcctgctgagtgcacagctcaaaggcttccctcttttcctgcattcgaacctgggcttgaaagactgcagcatcaaccccaagtccccactgctgtacgtgacacggcccagtgaggtagagaaaggtgtgctgcccggagaggactggacggtgttccagtctaaccactctacctatgagccagtgctgctggccaagacgcgctcctctgagtccatcccacacctgggcgcagatgccggcctgcatgctgccctgcacgctactgtggtccaggacctgggcctccatgacggcattcagcgtgtgctgtttggcaacaacctcaacttttggctgcataagctcgtcttcgtggacgctgtggccttcctcacagggaagcgcctctcactgcctttggaccgatacatcctggtggacattgatgacatttttgtaggcaaggagggcacacgcatgaaggtggaggatgtgaaggccctgtttgatacacagaatgaacttcgtacacatatcccaaacttcaccttcaacctgggctactcagggaaattcttccacacaggtaccgatgctgaggatgctggggacgacctgctgctgtcctatgtgaaagagttctggtggttcccccacatgtggagccatatgcaaccccacctcttccacaaccagtctgtgctggctgagcagatggccctgaacaagaagttcgctgtcgagcacggcattcccacagatatggggtatgcagtggcaccccaccactctggtgtgtaccctgtgcatgtgcagctgtatgaggcctggaagcaagtgtggaacatccgtgtgaccagcacagaggagtacccgcatctgaagcctgcccgttaccgccgtggcttcatccacaatggcatcatggtcctccctcggcagacctgtggtctctttacacacaccatcttctacaacgagtaccctggaggctccagtgagctggacaagatcatcaatgggggcgagctctttcttactgtgctcctcaatcctatcagcgtcttcatgacacacttatccaactatggaaatgaccgcctgggactgtacaccttcaagcacctggtgcgcttcctgcactcctggaccaacctgaggctgcagacgctgccccctgtgcagctggcccagaagtacttccagatcttttctgaggagaaggacccactttggcaggatccctgtgaggacaaacgccacaaagacatctggtctaaggagaagacatgtgatcgcttcccaaagctgctcatcattggcccccagaaaacaggcaccacagccctctacctgttcctgggcatgcaccccgacctcagcagcaactaccccagctccgagacctttgaggagatccagttttttaatggccacaactatcacaaaggcatcgactggtacatggaattcttccctattccctccaacaccacctctgacttctactttgaaaaaagtgccaactactttgattcagaagtggcaccacggcgagcagctgccctattgcccaaggccaaggttctcaccatcctcatcaatccagccgaccgggcttactcctggtaccagcaccagcgggcccatgatgacccggtggccctaaagtacaccttccatgaggtgatcacagctggccctgacgcatcctcaaagctgcgtgccctccagaaccgatgcctggtccccggctggtatgccactcatattgaacgctggctcagcgcctttcatgccaaccagatcctggtcttggatggcaaactgctgcgaacagaacctgccaaagtgatggacacagtgcagaaattcctcggggtgaccagcacggttgactaccataaaaccttggcgtttgacccaaagaaaggattttggtgccagctgctcgaaggaggaaaaaccaagtgtctgggaaaaagcaagggacggaaatatccagagatggacctggattcccgagccttcctaaaggattactaccgggaccacaacattgagctctctaagctgctgtataagatgggccagacactgcccacctggctgcgggaagacctccagaacaccaggtagccttggccaccacagccagccagaacgcttgtgttagcagggatgtcctgcctcacactgagccagactgacctgcctcgaaggatgctggccccagccagccaggagcaacgagcaataccctgctaaggcccaccagagccggaagcccaggcaggtctgcaagcgcctcagagcatccactgctggatgtgtggctgtgggacctctgtgggaccagaggtccattccgttccttcgcagcctccctgcctggggagagcacttcctgttggtggaaggtcatttcctggtaggaggagtcctggagactctctcctgtccctcactgtgttcggccagtcctgccctgttctgtgtcataccacccctgctccagcaggatgtcccctcagtattagctgtcatatttctctgtcctccagacagtaagggagaggagcgcagctgggcctctcgcccaactagagagaaagactgggcatgtccctgagggtttgagccaggccccgccagggtttaggtaggcacccagatgcactcatagattgaatgtgagggtggccatcttgagaggacatacgactcagtatttgggttattagtatcaatctcatctcccctttgggggaaagactctctggtccctattgtatccacctagtgctcatggtctcttgttggccctgggccactgccctgccactgggcccagagacatgggccttggccctgtcctgttcacctggatgtgacctgtggtgtttcctgtggtaaaggctgaggcgagtcaggagtctgccagtgttcatactcccatgtacatatacactgtctcccagccaccgcctcggcccggcaggcaagcagagtcagcagcactgctctctactgctttgcctggcaacctgtggctgagggtccccagagacccccccaacctcccaaatactaag

SEQ ID NO: 12992 - protein, 882 aa, Rattus norvegicus
  ref <308>: DATABASE ACCESSION NUMBER: SWISS-Prot / AAA41701
  ref <309>: DATABASE ENTRY DATE: 2002-06-15
MPALACLRRLCRHLSPQAVLFLLFVFCLFSVFVSAYYLYGWNRGLEPSADASESDCGDPPPVAPSRLLPIKPVQAVAPSRTDPLVLVFVESLYSQLGQEVVAILESSRFKYRTEIAPGKGDMPTLTDKGRGRFALIIYENILKYVNLDAWNRELLDKYCVAYGVGIIGFFKANENSLLSAQLKGFPLFLHSNLGLKDCSINPKSPLLYVTRPSEVEKGVLPGEDWTVFQSNHSTYEPVLLAKTRSSESIPHLGADAGLHAALHATVVQDLGLHDGIQRVLFGNNLNFWLHKLVFVDAVAFLTGKRLSLPLDRYILVDIDDIFVGKEGTRMKVEDVKALFDTQNELRTHIPNFTFNLGYSGKFFHTGTDAEDAGDDLLLSYVKEFWWFPHMWSHMQPHLFHNQSVLAEQMALNKKFAVEHGIPTDMGYAVAPHHSGVYPVHVQLYEAWKQVWNIRVTSTEEYPHLKPARYRRGFIHNGIMVLPRQTCGLFTHTIFYNEYPGGSSELDKIINGGELFLTVLLNPISVFMTHLSNYGNDRLGLYTFKHLVRFLHSWTNLRLQTLPPVQLAQKYFQIFSEEKDPLWQDPCEDKRHKDIWSKEKTCDRFPKLLIIGPQKTGTTALYLFLGMHPDLSSNYPSSETFEEIQFFNGHNYHKGIDWYMEFFPIPSNTTSDFYFEKSANYFDSEVAPRRAAALLPKAKVLTILINPADRAYSWYQHQRAHDDPVALKYTFHEVITAGPDASSKLRALQNRCLVPGWYATHIERWLSAFHANQILVLDGKLLRTEPAKVMDTVQKFLGVTSTVDYHKTLAFDPKKGFWCQLLEGGKTKCLGKSKGRKYPEMDLDSRAFLKDYYRDHNIELSKLLYKMGQTLPTWLREDLQNTR

SEQ ID NO: 12993 - DNA, 3188 bp, Homo sapiens
  ref <308>: DATABASE ACCESSION NUMBER: Refseq / NM_004784
  ref <309>: DATABASE ENTRY DATE: 2002-05-14
ccggtcccttggcgacgggtcttgcatgtgacactcttgccctctagtgcctcaccagcttggtagcagtttgatggctaatattaataagatgttacataacatgagagtactgggccaggactggtgttgctaccacttgtaaagtcaaaaagcctgagccgatggtaacgagtggtactgtttccgtttcttttccatctattgcaactttctcaagcattttcagctctgaactttaattccagactgtattttctgtgagtcctgatcaagtgatacaaatgagctgcaatggtgacataaactcttgacagagattggaaaagtagctggaacaccatcttttcttttaactttttatggtgcttctgttggcatagttggggaaagcacctacaacatgagttttatcatgaagcttcacagacactttcaaagaacagtcattctgcttgccactttttgtatggtgagcattatcatttctgcttactacctgtacagtggctacaaacaggaaaatgaactctctgagacggcttcagaagttgactgtggcgacctccaacacctaccatatcaactaatggaagtgaaagcaatgaagctttttgatgcctcaaggacagaccccacagtcctagtatttgtagagagccagtactcatctcttggtcaagacatcattatgattctagaatcaagtagattccagtatcacattgaaattgcccctggaaagggagatctcccagtgcttatagacaaaatgaaaggcaaatacattctcattatttatgagaatattttaaagtatataaatatggattcctggaatcgaagccttctagataaatactgtgtagaatatggtgtgggtgtcattggattccacaaaactagtgagaagagtgtacagagctttcagttaaaaggtttccctttttccatatatggaaatcttgcagtaaaagattgttgtattaatcctcattctccattgattcgtgtgaccaaatcttccaagcttgaaaaaggttctttacctggaactgactggacagtttttcagattaatcattcagcctatcaaccagtaatatttgccaaagtaaagaccccagaaaacctttctccttccatctctaaaggtgctttttatgccactattatacatgacctggggcttcatgatggaattcaaagggttctttttggcaacaacttgaacttttggctgcacaagctcatcttcatagatgccatctccttcttatcagggaagaggctgacattgtccttggacaggtacattcttgtggatattgatgatatatttgtgggaaaagagggaacaagaatgaacaccaatgatgtaaaggccctgcttgatactcagaatcttttgcgtgcacaaatcacaaattttacattcaacctgggattttcagggaaattttaccatacaggaactgaagaggaagatgaaggagatgactgtctgttggggtctgtggatgagttctggtggtttcctcacatgtggagccatatgcagccccacctcttccacaatgagtcatctttggtggagcagatgattctcaacaaaaaatttgccttagagcacggcattccaacggacatgggctacgctgtggcccctcaccattcgggcgtctaccctgtacatgttcagctttatgaggcctggaagaaggtctggaatattaaaatcaccagcactgaagaatatccacatctgaagccagctagataccggaggggttttatccacaaaaacatcatggttctcccaagacaaacctgtgggcttttcactcacaccattttctacaaagaatatccagggggtcctaaagagctggataagagtatccaaggaggagaacttttcttcactgtcgtcctcaaccctatcagcattttcatgacccatttgtccaactatgggaatgaccgactgggattatatacatttgttaatctggccaactttgtgaagagctggaccaacctgcgacttcagactctgcctccagtacaactggcccacaagtattttgagctgtttcctgatcagaaagaccctctctggcagaatccttgcgatgacaaacgccacagagacatttggtctaaagaaaaaacttgtgatcgcttaccaaaattcttggtaataggaccccagaaaactggtaccactgctttgtatttgttcctggttatgcatccttccatccttagtaactcccccagcccaaaaacctttgaggaggtacagttctttaatagaaataactaccacagggggattgattggtatatggatttcttcccagtcccatctaatgtcactaccgactttttgtttgagaagagtgccaattacttccactcagaggaagcccctaaaagagctgcttctctggttcccaaagccaagattatcaccattctcattgacccttcagaccgagcatactcctggtaccagcatcagcgatcacatgaagaccctgcagctctgaagtttagcttctacgaagtgatctcagcagggccccgtgcaccctcggagctcagagccttgcagaagagatgtttggtcccggggtggtatgccagccacatcgagagatggcttgtttatttccccccatttcagttgctaattattgatgggcaacaactaagaactgatcctgctacagtgatggatgaagtacagaagtttctaggagtcttgcctcattataattactcagaagctttaacgtttgattctcataaaggtttctggtgtcagttactggaagaaggtaaaacaaaatgccttggaaagagcaaaggaagaaaataccctccaatggattctgatagcaggacatttctgtcaagctactatcgagatcacaacgtggaactctcaaagctgctgcacaaactgggtcagcctctgccatcctggctgagacaggagctgcagaaagtaagatagcactgagagaaaacttgagacttcatcgtccatgtagaacacaccttttccaaagcttccagaagctaccaaaaggcagttgaaaaatatacctcttcaaatgagaaaaaagaacagtttcttccatgtgctggcacgtggatgattagaaaaaaaaaaaaaa

SEQ ID NO: 12994 - protein, 873 aa, Homo sapiens
  ref <308>: DATABASE ACCESSION NUMBER: Refseq / NP_004775
  ref <309>: DATABASE ENTRY DATE: 2002-05-14
MSFIMKLHRHFQRTVILLATFCMVSIIISAYYLYSGYKQENELSETASEVDCGDLQHLPYQLMEVKAMKLFDASRTDPTVLVFVESQYSSLGQDIIMILESSRFQYHIEIAPGKGDLPVLIDKMKGKYILIIYENILKYINMDSWNRSLLDKYCVEYGVGVIGFHKTSEKSVQSFQLKGFPFSIYGNLAVKDCCINPHSPLIRVTKSSKLEKGSLPGTDWTVFQINHSAYQPVIFAKVKTPENLSPSISKGAFYATIIHDLGLHDGIQRVLFGNNLNFWLHKLIFIDAISFLSGKRLTLSLDRYILVDIDDIFVGKEGTRMNTNDVKALLDTQNLLRAQITNFTFNLGFSGKFYHTGTEEEDEGDDCLLGSVDEFWWFPHMWSHMQPHLFHNESSLVEQMILNKKFALEHGIPTDMGYAVAPHHSGVYPVHVQLYEAWKKVWNIKITSTEEYPHLKPARYRRGFIHKNIMVLPRQTCGLFTHTIFYKEYPGGPKELDKSIQGGELFFTVVLNPISIFMTHLSNYGNDRLGLYTFVNLANFVKSWTNLRLQTLPPVQLAHKYFELFPDQKDPLWQNPCDDKRHRDIWSKEKTCDRLPKFLVIGPQKTGTTALYLFLVMHPSILSNSPSPKTFEEVQFFNRNNYHRGIDWYMDFFPVPSNVTTDFLFEKSANYFHSEEAPKRAASLVPKAKIITILIDPSDRAYSWYQHQRSHEDPAALKFSFYEVISAGPRAPSELRALQKRCLVPGWYASHIERWLVYFPPFQLLIIDGQQLRTDPATVMDEVQKFLGVLPHYNYSEALTFDSHKGFWCQLLEEGKTKCLGKSKGRKYPPMDSDSRTFLSSYYRDHNVELSKLLHKLGQPLPSWLRQELQKVR

SEQ ID NO: 12995 - DNA, 1738 bp, Rattus norvegicus
  ref <308>: DATABASE ACCESSION NUMBER: EMBL / M96630
  ref <309>: DATABASE ENTRY DATE: 2002-08-09
gtctcggctgaggaagcgcgctccagatctagcagcaccgtcgcctcactcgaagtggagcgcagtcgaggcagggagtgtagtcggaccagccagccatggcgatcaaatttctggaagtcatcaagccattctgtgtcatcttgccggaaattcagaagccagagagaaagattcagtttaaggagaaggtgttgtggacggccatcaccctcttcatcttcttagtatgctgccagattcccctgtttggcatcatgtcttcagactcagctgaccccttctactggatgcgagtgattctggcctctaacagaggtaccttgatggagctgggtatctctcctattgtcacgtccggccttatcatgcagctcttagctggtgccaagataattgaagttggggacaccccgaaagaccgagctctcttcaatggagcccaaaagttgtttggaatgatcatcactatcggtcagtccattgtgtacgtgatgacgggcatgtacggggacccttcagagatgggtgctggaatctgcctgctgatcaccattcagctctttgttgctggcttaattgtcctacttttggatgaactcctgcagaaaggatatggcttgggctctggcatctctctcttcattgcgactaatatctgtgagaccattgtatggaaggcattcagccccaccactgtcaacactggccgagggatggaatttgaaggcgccatcattgcgctgttccacctgctggccacccgcacagacaaggtccgagcccttcgagaggcattctaccgccagaacctccctaacctcatgaacctgattgccaccatcttcgtctttgctgttgtcatctatttccagggcttccgagtggaccttccaatcaagtcggcgcgttaccgaggccagtacaatacctaccccatcaagctcttctacacctccaacattcccatcatcttgcagtctgctctggtgtccaacctgtatgtcatctcccagatgctgtcagcacgtttcagtggcaacctgctggttagcctgctgggcacctggtcggatacgtcatctgggggcccagcccgtgcttacccagttggtggcctgtgttactacctgtctcctccggaatcattcggctcagtgctggaggaccctgtccatgcggtcgtgtacattgtattcatgctgggttcctgtgcattcttttccaaaacatggatcgaagtttcgggttcttctgccaaagatgttgccaagcagctgaaggagcagcagatggtgatgagaggccacagggagacctccatggtgcatgagctcaaccggtacatccccacagctgcagccttcggtgggctgtgcattggggccctctctgtcctggctgatttcctgggtgctatcgggtctggcaccgggatcctgctggcggtcaccatcatctaccagtactttgagatcttcgtcaaagagcagagcgaggtgggcagcatgggagcccttctcttctgagcctcgtgtgcctgtggaccagggtgagggcacaggctccagaactgccccggaaggtgctcttactgctggagcatgctactgtggcatagggactttaatttttttttttttaatttcatatctcttcattcaactgtgtaaagtgctaggaaatttgcaatttgaagttttgctttttctgacattggcaagagactgatagaatt

SEQ ID NO: 12996 - protein, 475 aa, Rattus norvegicus
  ref <308>: DATABASE ACCESSION NUMBER: SWISS-Prot / AAA42125
  ref <309>: DATABASE ENTRY DATE: 2002-06-15
AIKFLEVIKPFCVILPEIQKPERKIQFKEKVLWTAITLFIFLVCCQIPLFGIMSSDSADPFYWMRVILASNRGTLMELGISPIVTSGLIMQLLAGAKIIEVGDTPKDRALFNGAQKLFGMIITIGQSIVYVMTGMYGDPSEMGAGICLLITIQLFVAGLIVLLLDELLQKGYGLGSGISLFIATNICETIVWKAFSPTTVNTGRGMEFEGAIIALFHLLATRTDKVRALREAFYRQNLPNLMNLIATIFVFAVVIYFQGFRVDLPIKSARYRGQYNTYPIKLFYTSNIPIILQSALVSNLYVISQMLSARFSGNLLVSLLGTWSDTSSGGPARAYPVGGLCYYLSPPESFGSVLEDPVHAVVYIVFMLGSCAFFSKTWIEVSGSSAKDVAKQLKEQQMVMRGHRETSMVHELNRYIPTAAAFGGLCIGALSVLADFLGAIGSGTGILLAVTIIYQYFEIFVKEQSEVGSMGALLF

SEQ ID NO: 12997 - DNA, 1738 bp, Rattus norvegicus; identical to SEQ ID NO: 12995
  ref <308>: DATABASE ACCESSION NUMBER: EMBL / M96630
  ref <309>: DATABASE ENTRY DATE: 2002-08-09

SEQ ID NO: 12998 - protein, 475 aa, Rattus norvegicus; identical to SEQ ID NO: 12996
  ref <308>: DATABASE ACCESSION NUMBER: SWISS-Prot / AAA42125
  ref <309>: DATABASE ENTRY DATE: 2002-06-15

SEQ ID NO: 12999 - DNA, 3457 bp, Rattus norvegicus
  ref <308>: DATABASE ACCESSION NUMBER: EMBL / M99223
  ref <309>: DATABASE ENTRY DATE: 2000-03-04
tggggtcagaacttcgtggaaaggagaagaatctggggggggcaagcaagaaaaaggaaggagcccaggttaacaggcaggtggatacactgaagaagtccccccacaagtgagaggcccctaagaaggaatacatcaccccctggcccccaagaagggagcagaatggaggccgcacactccaagtccacagaggaatgtttgtcctattttggggtgagcgagaccacaggccttaccccagaccaagttaagcggcatctggaaaaatacggccccaatgagctccctgctgaggaaggcaagtctctgtgggagttggtggtagagcagttcgaagacctgctggtgcggattctcctcctggctgcctgcatttcctttgtgctggcctggtttgaggaaggtgaggaaactgtcactgcctttgtggagccttttgtcattctcttgatcctcattgccaacgccattgtgggggtttggcaggaacggaatgcagagaatgccatcgaggcgctgaaggaatatgaacccgagatggggaaggtctatcgggctgaccgaaagtcagtgcaaaggatcaaggctcgggacatcgtccctggggacattgtggaggtggctgttggggacaaagtccctgcagacatccgaatcctctccatcaaatccaccaccctccgggtcgaccagtccatcctgacaggagagtctgtatctgtcatcaagcacacagaccctgtccctgatccccgagctgtcaaccaggacaagaagaacatgctcttctcgggtaccaacattgcagccggcaaggccgtaggcatcgtggccaccactggtgtgagtactgagattggcaagatccgagaccaaatggctgccactgagcaggacaagaccccgcttcagcagaagcttgatgagtttggggaacagctgtccaaggtcatctctctcatctgtgtggctgtctggcttatcaacattggtcacttcaacgaccctgtccatgggggctcctggttccggggggccatttactacttcaagattgctgtagccttggctgtggcagccatcccagaagggcttcctgctgtcatcaccacctgcttggccttgggtacccgccggatggcaaagaagaacgccatcgtgaggagtttgccctctgtggagaccctgggctgtacctctgtcatctgttctgacaaaacagggaccctcaccaccaaccagatgtcagtttgcaagatgttcatcattgacaaagtggatggggatatctgctcactgaacgagttctccatcactggctctacttatgctcctgagggagaagttttgaagaatgataagccagtccgagcagggcagtatgacgggctggtggaacttgctaccatctgtgccctctgcaatgactcctccttggactttaatgagaccaaaggtgtctatgagaaggtgggcgaggccaccgagacagccctcaccaccttggtggagaagatgaatgtgttcaacacggaagtgagaagcctctccaaagtggagcgggctaatgcctgcaactcggtgatccgccaactaatgaagaaggaattcaccctggaattttcccgagacaggaagtctatgtctgtctactgctccccagccaagtcttcacgggctgctgtaggcaacaagatgtttgtcaagggtgcccctgagggcgtcattgaccgctgtaactatgtgcgtgttggcacaacccgtgtgccactgacaggccctgtgaaggagaagatcatgtcggtgatcaaggagtggggtactggtcgggataccctacggtgcctggcactggccacccgggacacaccccccaaacgggaggaaatggttctggatgactcagccaagttcatggagtatgagatggacctgacgtttgttggtgtggtgggcatgttggatccaccccgtaaggaggtcacaggctctatccagctgtgtcgtgatgccgggatccgagtgatcatgatcactggggacaacaagggtaccgccatcgccatctgccgacgaattggcatcttttcggagaatgaggaagtggcagaccgtgcctacactggccgtgagtttgatgatctgcccctggctgagcagcgggaagcctgcagacgcgcctgctgcttcgctcgtgtggagccctcacataagtccaagattgtggagtacctgcagtcctatgatgagatcacagccatgacaggggatggtgtcaatgatgcccctgctctgaagaaggcggagattggcattgccatgggatctggtactgctgtggctaagactgcctccgagatggtactggctgatgataacttctccaccattgtggctgccgtggaggaaggccgtgccatctacaacaacatgaagcagttcatccgctacctcatttcctccaatgtgggcgaggtggtctgtatcttcttgacagcagccttggggctgcctgaggccttgatccctgtgcagctgctatgggtgaacttggtgactgatgggctccctgctactgccctggggttcaacccacctgacctggacatcatggaccgtccccccaggagtcccaaggagcctcttatcagtggctggctctttttccgctacatggcaattgggggctacgtgggtgcagccactgtgggagcagctgcctggtggttcttgtatgcagaggatgggcctcatgtcagctaccatcaactgactcatttcatgcagtgcactgagcataaccctgaatttgatggcctggactgcgaggtctttgaagcccccgagcccatgaccatggccttgtctgtgttggtgaccatcgagatgtgcaacgccctcaacagcctgtctgagaaccagtccctactgcggatgccgccctgggtgaacatctggcttctcggttccatctgcctgtccatgtccctccacttcctcatcctctatgttgaccccctgccgatgatcttcaagctccgggccctggactttacccagtggctcatggtcctcaagatctcacttccagtcatcgggctagatgagcttctcaagttcattgctcggaactatctggagggataaccacccccctcctccatgtctttgaaccgtgtcacagatccagaagacgaaagaaggaagtaaccagcccttgtgccctgtcttccccaccctaatggcaaggcgtcttcagccaaagctgaagcacagagccttcttccccttgattctgtttataaataaagttccccaccctcgttcccttcagcaacctgctctccctctgaaccttgtaaatccccttcccgacctcacgacctcacggggcttacagggacaaggcaactagctgactgcttatttattgaaaataaatgacagaaaagtc

SEQ ID NO: 13000 - protein, 994 aa, Rattus norvegicus
  ref <308>: DATABASE ACCESSION NUMBER: SWISS-Prot / AAA40991
  ref <309>: DATABASE ENTRY DATE: 2002-06-15
MEAAHSKSTEECLSYFGVSETTGLTPDQVKRHLEKYGPNELPAEEGKSLWELVVEQFEDLLVRILLLAACISFVLAWFEEGEETVTAFVEPFVILLILIANAIVGVWQERNAENAIEALKEYEPEMGKVYRADRKSVQRIKARDIVPGDIVEVAVGDKVPADIRILSIKSTTLRVDQSILTGESVSVIKHTDPVPDPRAVNQDKKNMLFSGTNIAAGKAVGIVATTGVSTEIGKIRDQMAATEQDKTPLQQKLDEFGEQLSKVISLICVAVWLINIGHFNDPVHGGSWFRGAIYYFKIAVALAVAAIPEGLPAVITTCLALGTRRMAKKNAIVRSLPSVETLGCTSVICSDKTGTLTTNQMSVCKMFIIDKVDGDICSLNEFSITGSTYAPEGEVLKNDKPVRAGQYDGLVELATICALCNDSSLDFNETKGVYEKVGEATETALTTLVEKMNVFNTEVRSLSKVERANACNSVIRQLMKKEFTLEFSRDRKSMSVYCSPAKSSRAAVGNKMFVKGAPEGVIDRCNYVRVGTTRVPLTGPVKEKIMSVIKEWGTGRDTLRCLALATRDTPPKREEMVLDDSAKFMEYEMDLTFVGVVGMLDPPRKEVTGSIQLCRDAGIRVIMITGDNKGTAIAICRRIGIFSENEEVADRAYTGREFDDLPLAEQREACRRACCFARVEPSHKSKIVEYLQSYDEITAMTGDGVNDAPALKKAEIGIAMGSGTAVAKTASEMVLADDNFSTIVAAVEEGRAIYNNMKQFIRYLISSNVGEVVCIFLTAALGLPEALIPVQLLWVNLVTDGLPATALGFNPPDLDIMDRPPRSPKEPLISGWLFFRYMAIGGYVGAATVGAAAWWFLYAEDGPHVSYHQLTHFMQCTEHNPEFDGLDCEVFEAPEPMTMALSVLVTIEMCNALNSLSENQSLLRMPPWVNIWLLGSICLSMSLHFLILYVDPLPMIFKLRALDFTQWLMVLKISLPVIGLDELLKFIARNYLEG

SEQ ID NO: 13001 - DNA, 4553 bp, Homo sapiens
  ref <308>: DATABASE ACCESSION NUMBER: Refseq / NM_005173
  ref <309>: DATABASE ENTRY DATE: 2000-11-01
ggcggcatggaggcggcgcatctgctcccggccgccgacgtgctgcgccacttctcggtgacagccgagggcggcctgagcccggcgcaggtgaccggcgcgcgggagcgctacggccccaacgagctcccgagtgaggaagggaagtccctgtgggagctggtgctggaacagtttgaggacctcctggtgcgcatcctgctgctggctgcccttgtctcctttgtcctggcctggttcgaggagggcgaggagaccacgaccgccttcgtggagcccctggtcatcatgctgatcctcgtggccaacgccattgtgggcgtgtggcaggaacgcaacgccgagagtgccatcgaggccctgaaggagtatgagcctgagatgggcaaggtgatccgctcggaccgcaagggcgtgcagaggatccgtgcccgggacatcgtcccaggggacattgtagaagtggcagtgggggacaaagtgcctgctgacctccgcctcatcgagatcaagtccaccacgctgcgagtggaccagtccatcctgacgggtgaatctgtgtccgtgaccaagcacacagaggccatcccagaccccagagctgtgaaccaggacaagaagaacatgctgttttctggcaccaatatcacatcgggcaaagcggtgggtgtggccgtggccaccggcctgcacacggagctgggcaagatccggagccagatggcggcagtcgagcccgagcggacgccgctgcagcgcaagctggacgagtttggacggcagctgtcccacgccatctctgtgatctgcgtggccgtgtgggtcatcaacatcggccacttcgccgacccggcccacggtggctcctggctgcgtggcgctgtctactacttcaagatcgccgtggccctggcggtggcggccatccccgagggcctcccggctgtcatcactacatgcctggcactgggcacgcggcgcatggcacgcaagaacgccatcgtgcgaagcctgccgtccgtggagaccctgggctgcacctcagtcatctgctccgacaagacgggcacgctcaccaccaatcagatgtctgtctgccggatgttcgtggtagccgaggccgatgcgggctcctgccttttgcacgagttcaccatctcgggtaccacgtatacccccgagggcgaagtgcggcagggggatcagcctgtgcgctgcggccagttcgacgggctggtggagctggcgaccatctgcgccctgtgcaacgactcggcgctggactacaacgaggccaagggtgtgtacgagaaggtgggagaggccacggagacagctctgacttgcctggtggagaagatgaatgtgttcgacaccgacctgcaggctctgtcccgggtggagcgagctggcgcctgtaacacggtcatcaagcagctgatgcggaaggagttcaccctggagttctcccgagaccggaaatccatgtccgtgtactgcacgcccacccgccctcaccctaccggccagggcagcaagatgtttgtgaagggggctcctgagagtgtgatcgagcgctgtagctcagtccgcgtggggagccgcacagcacccctgacccccacctccagggagcagatcctggcaaagatccgggattggggctcaggctcagacacgctgcgctgcctggcactggccacccgggacgcgcccccaaggaaggaggacatggagctggacgactgcagcaagtttgtgcagtacgagacggacctgaccttcgtgggctgcgtaggcatgctggacccgccgcgacctgaggtggctgcctgcatcacacgctgctaccaggcgggcatccgcgtggtcatgatcacgggggataacaaaggcactgccgtggccatctgccgcaggcttggcatctttggggacacggaagacgtggcgggcaaggcctacacgggccgcgagtttgatgacctcagccccgagcagcagcgccaggcctgccgcaccgcccgctgcttcgcccgcgtggagcccgcacacaagtcccgcatcgtggagaacctgcagtcctttaacgagatcactgctatgactggcgatggagtgaacgacgcaccagccctgaagaaagcagagatcggcatcgccatgggctcaggcacggccgtggccaagtcggcggcagagatggtgctgtcagatgacaactttgcctccatcgtggctgcggtggaggagggccgggccatctacagcaacatgaagcaattcatccgctacctcatctcctccaatgttggcgaggtcgtctgcatcttcctcacggcaattctgggcctgcccgaagccctgatccctgtgcagctgctctgggtgaacctggtgacagatggcctacctgccacggctctgggcttcaacccgccagacctggacatcatagagaagctgccccggagcccccgagaagccctcatcagtggctggctcttcttccgatacctggctatcggagtgtacgtaggcctggccacagtggctgccgccacctggtggtttgtgtatgacgccgagggacctcacatcaacttctaccagctgaggaacttcctgaagtgctccgaagacaacccgctctttgccggcatcgactgtgaggtgttcgagtcacgcttccccaccaccatggccttgtccgtgctcgtgaccattgaaatgtgcaatgccctcaacagcgtctcggagaaccagtcgctgctgcggatgccgccctggatgaacccctggctgctggtggctgtggccatgtccatggccctgcacttcctcatcctgctcgtgccgcccctgcctctcattttccaggtgaccccactgagcgggcgccagtgggtggtggtgctccagatatctctgcctgtcatcctgctggatgaggccctcaagtacctgtcccggaaccacatgcacgaagaaatgagccagaagtgagcgctgggaacagggtggagtctccggtgtgtacctcagactgatggtgcccatgtgttcgcctccgccccccacccttgccaccacactcgcccacttgcccaccgggtcccgccggataaatgacaggcccgaggtcagaatggccatccccgggccccgtcctggggtctctgtccccacttccttctggcctgggaggtctgtaattcctgtctcctggactctcctgggaagttccctgctctgcagctctggcccaggagctgcaggctgggagggggcagccaagaagccggagctggcagcatacccagagatccggggcccccccacccccaaatcacgagtgcagctggagcttgctcccccttgttcggaagctggacgttcacttggtgactggtgcctctgcactgacggaggactctgggggtccttcttaccggctctgacctctctcttcgtgcctggtctgggactgggtcagccctgggggatcagaaggggccatctgggcccagctgtgtacagcgagggtgggcagccccctccactccactctgcttccacaaagtcggctcccgagagctcgaggctgcttctgtttatatgtgcagggcccgggccggtgaagggtcagagagacggacacaaggagccggcaggagggcggagcgaggatgtcctttcccgggagacaagtcgggaaagcctggctggactgcctcagccccgcgcgcctcctggactcagggttccccgtcctgagctcgggagatgttcagagtcacactgccgcccggtctgccacgcagaggtccaacttgccacccgcgtccctggtacctgagaccaccgacatcctcaggttcctgaccgtggcgcccttctacccagcccagtgtgcggccgccgcgctgtctgcacagctgggggcctctgagcctggtgggcttcctggactcttggcctcactccttgccccctccccacgacacccatgagccgaaaggatgtcactaaggatggctgattccccaagggcacccgctctccctccctccctgctggaggaacacgtcatatcagatgagaggaagatggcctctgatggacagaatttttctcttaactcagcttttgctactttggcaaaaactagcgaggggtagcagaaacctgcaccaaggattgtccctatgtcttggcccctcctagagcgtgtgcagactgatgattttatatgtaaatcaagactcacatccctttcctagtcccccacatccaaagcccctcagcctgccttgcagaccaatgggctccatgttctgtagccccctcccctacgcctcacccctcctccctctcacaggttctgggcggccagtgagagaaacgcagtgggggaggcagggagtctggtgcctgcagagattctctgcttctttcctggggggaggtggggaggtcttagcaggagcgggccctgtacccacctgctgacctgctgtttggtagagaaataaaggttgtgtgactggggg

SEQ ID NO: 13002 - protein, 999 aa, Homo sapiens [sequence omitted]

SEQ ID NO: 13003 - DNA, 267 bp, Rattus norvegicus
  ref <308>: DATABASE ACCESSION NUMBER: EMBL / AI639453
  ref <309>: DATABASE ENTRY DATE: 2000-03-04
ttaaaagctttacctttgaaacgcctgggaaaacttaaggggcccccaggggaaaaacatgaccccaaaggggaaaccgcttaaaaccatcgatccctgcacttagggctggacctggagttgattttgccatgatccagggcctgcaggaaagaacaaaaattcctttccttttttccctttccctttccctttccctttccctttttccctttccctttccctttccctttccctttccctttccctgttattatcccccccccc

SEQ ID NO: 13004 - DNA, 267 bp, Rattus norvegicus; identical to SEQ ID NO: 13003
  ref <308>: DATABASE ACCESSION NUMBER: EMBL / AI639453
  ref <309>: DATABASE ENTRY DATE: 2000-03-04

SEQ ID NO: 13005 - DNA, 424 bp, Rattus norvegicus
  ref <308>: DATABASE ACCESSION NUMBER: EMBL / AI639495
  ref <309>: DATABASE ENTRY DATE: 2000-03-04
ttctttttttcggagctggggaccgaacccagggccttgcgcttgctaggcaagcgctctaccactgagctaaatccccaaccccacatcaattgtttcaaattgcatcactgactataaacattaaaatggtaagatgtctgaagggagaagtctcttacatccataacatgtatgatcctgtttgctgactctgctgttaaagtatgactgatggaggctggggatataattcatggtagaatgctgccttctatattagatttatgcattttcttatttttatgtgagtattttggctgaacatatgcatgtgcaccacttgcatgcctggtgcctccccagaggtcaaaagaggctgttggatccctggaactggtgttttagatcattgtgaatcaccatgtgggtgctgggaatcaaa

SEQ ID NO: 13006 - DNA, 334 bp, Rattus norvegicus
  ref <308>: DATABASE ACCESSION NUMBER: EMBL / AI639248
  ref <309>: DATABASE ENTRY DATE: 2000-03-04
ttccacggggaggaggagccattttactggcccacaattttatttgctgggcattaattttaatgtcttcacaaaggcctttgacacaaatttacaaaaaataatttattaataaactatagctgatcattttgcgttttccaatgtttaaggcccctccttttaagtatttttgggttccactgggccttttttgtcgacctcccatgattaatcctgaacatccgttttttttgccaaagatgtatcaccctgtaactaatacccactttttttggacgggtcttgtttaaatatatttctaagccacaggggccaccttaaccagataatt

SEQ ID NO: 13007 - DNA, 334 bp, Rattus norvegicus; identical to SEQ ID NO: 13006
  ref <308>: DATABASE ACCESSION NUMBER: EMBL / AI639248
  ref <309>: DATABASE ENTRY DATE: 2000-03-04

SEQ ID NO: 13008 - DNA, 334 bp, Rattus norvegicus; identical to SEQ ID NO: 13006
  ref <308>: DATABASE ACCESSION NUMBER: EMBL / AI639248
  ref <309>: DATABASE ENTRY DATE: 2000-03-04

SEQ ID NO: 13009 - DNA, 398 bp, Rattus norvegicus
  ref <308>: DATABASE ACCESSION NUMBER: EMBL / AI639536
  ref <309>: DATABASE ENTRY DATE: 2000-03-04
ttggtctggatatttacaaaagatcaccacagacagattatcctggtgttttctctataacgaagacttggctgctctctggggagaaaactgtgccagttggtctaggttcagaagatgaagattttggtggtgaattaaggcttctgtgggacgtcggaacagtttcacgacactcagagatggagaggacagaaagagcctaggttgttctagccagtcttctttgcctcaggaagctgcatcccagctagtatcttctgttacacttttggtcccctccttcctctgcagtcctgactgataacaaggcttctatgccttgtaggaggagcctttcgagcttgtaatgattcctcacggttaatatgaaaacctcgtggacattgcctgccatg

SEQ ID NO: 13010 - DNA, 437 bp, Rattus norvegicus; identical to SEQ ID NO: 7496
  ref <308>: DATABASE ACCESSION NUMBER: EMBL / AI639518
  ref <309>: DATABASE ENTRY DATE: 2000-03-04

SEQ ID NO: 13011 - protein, 83 aa, Rattus norvegicus; identical to SEQ ID NO: 7497
  ref <308>: DATABASE ACCESSION NUMBER: SWISS-Prot / AAD19908
  ref <309>: DATABASE ENTRY DATE: 2002-10-01

SEQ ID NO: 13012 - DNA, 867 bp, Homo sapiens
  ref <308>: DATABASE ACCESSION NUMBER: EMBL / U37689
  ref <309>: DATABASE ENTRY DATE: 2000-03-04
ccctcactaaagggacaaaagctggagctccaccgcggtgcggccgctctagaactagtggatcccccgggctgcaggtccggtcttgtccacgctagggggtgcacgtactcccaactgtggtcgcgctctcaccccttctgctgctctcgtggccccctcgcgatggcgggcatcctgtttgaggatattttcgatgtgaaggatattgacccggaggccaagaagtttgaccgagtgtctcgactgcattgtgagagtgaatctttcaagatggatctaatcttagatgtaaacattcaaatttaccctgtagacttgggtgacaagtttcggttggtcatagctagtaccttgtatgaagatggtaccctggatgatggtgaatacaaccccactgatgataggccttccagggctgaccagtttgagtatgtaatgtatggaaaagtgtacaggattgagggagatgaaacttctactgaagcagcaacacgcctctctgcgtacgtgtcctatgggggcctgctcatgaggctgcagggggatgccaacaacctgcatggattcgaggtggactccagagtttatctcctgatgaagaagctagccttctgaacctcgcctgaagccagcctctctgccaagtcactcaggtcatgggcattgttcaagcctgagtggcagccgctcttgctcacctgttgaggaagggctggctcactgtccaccgtggcggcatctttaactggcctccactcaatgggaaactgactcgcctgtgaaagacacagtgggagagctgaaaatgaatcagaagctttatgtatatgatttttaaattaaactttactttttcagactgcc

SEQ ID NO: 13013 - protein, 150 aa, Homo sapiens; identical to SEQ ID NO: 7499
  ref <308>: DATABASE ACCESSION NUMBER: SWISS-Prot / P52434
  ref <309>: DATABASE ENTRY DATE: 2002-06-15

SEQ ID NO: 13014 - DNA, 543 bp, Rattus norvegicus
  ref <308>: DATABASE ACCESSION NUMBER: EMBL / AI639015
  ref <309>: DATABASE ENTRY DATE: 2000-03-04
ttctgtatgaaataatttattgtagcattgtcaagattggcattattttacagtatttttttttctcttcaagaactacgagtctaaagaaataaaggaaaactactttaattagaactatctaaataaaatcttctgttttggtttatatcagatagatttacagacatattgtcactgagaaatagagtgattccattatataaaatatggcaaaaagggtccccccaaatactgttcaacaacactatggtttaatagtttaattatagtttaaattctcatctgagaaacctaaaaatgtactgaatggcttgtgtggggacagtgctgtgttttaatttgtactttgcccaatcatcctcccttgaagaaaactcagggtaagctacttgctaaactctctaagtaactcaatcaagaaaacacaattgctattcaataaaaaaaaaatccaatttaagaaaagaaaaagaaaacaattcctctacaatagtctgtaagaccagaatagatacacaacaaatttaatggttaaattta

SEQ ID NO: 13015 - DNA, 557 bp, Rattus norvegicus
  ref <308>: DATABASE ACCESSION NUMBER: EMBL / AI639532
  ref <309>: DATABASE ENTRY DATE: 2000-03-04
ttacattgtctgcttttattccttccagccacagagcccaaaggagcagcctttccctggtagggcaaggaggcaaggatggagttgcccacgcccaggggacctgcagtctggatgaacacgaagaccagctccttactgaacgccctccatcatcttcagaaactcgtcgaagtcaatgcggccatcgttgttcttatcaccatccttcatcagggattcgatctcctcgtctgtcacatgctccccagaagcccggaaaatctcagccagctcctcggcatcaatgtaaccgactgcgttcctgtcaaagatgcggaaacactcagccagttcctcttcgctcttccctttcgcatcctctttcatctggcgcaccatcatgaccaagaactcttcaaagtcgatggtaccgctgccatcctcgtccacctcctcgatgatggcgtccagatcctctttggtgggtgtctgccctagcatcctcatcacggtacccagctctttaacgctgatgtccccaccaccatcagcatcaaacccggacccgtacctgc

SEQ ID NO: 13016 - DNA, 677 bp, Homo sapiens
  ref <308>: DATABASE ACCESSION NUMBER: Refseq / NM_003279
  ref <309>: DATABASE ENTRY DATE: 2000-10-31
atctttgggtggtggagtgcaaaggaggcgacctgcaacagaggagtcccggtcaccagcaaccatgacggaccagcaggctgaggccaggtcctacctcagcgaagagatgatcgctgagttcaaggctgcctttgacatgtttgatgctgatggtggtggggacatcagcgtcaaggagttgggcacggtgatgaggatgctgggccagacacccaccaaggaggagctggacgccatcatcgaggaggtggatgaggacggcagcggcaccatcgacttcgaggagttcttggtcatgatggtgcgccagatgaaagaggacgcgaaagggaagagcgaggaggagctggccgagtgcttccgcatcttcgacaggaatgcagacggctacatcgacccggaggagctggctgagattttcagggcctccggggagcacgtgactgacgaggagatcgaatctctgatgaaagacggcgacaagaacaacgacggccgcattgacttcgacgagttcctgaagatgatggagggcgtgcagtaaggagtggacagtcgcctctaccaagatcgcgtgtccctagggtgtgggagactccgccctgccgggtccccaccagggaggcgcggccccttgtgggtctttgtctggaaggaataaaagcaaatgttcc

SEQ ID NO: 13017 - protein, 160 aa, Homo sapiens
  ref <308>: DATABASE ACCESSION NUMBER: Refseq / NP_003270
  ref <309>: DATABASE ENTRY DATE: 2000-10-31
MTDQQAEARSYLSEEMIAEFKAAFDMFDADGGGDISVKELGTVMRMLGQTPTKEELDAIIEEVDEDGSGTIDFEEFLVMMVRQMKEDAKGKSEEELAECFRIFDRNADGYIDPEELAEIFRASGEHVTDEEIESLMKDGDKNNDGRIDFDEFLKMMEGVQ

SEQ ID NO: 13018 - DNA, 600 bp, Rattus norvegicus
  ref <308>: DATABASE ACCESSION NUMBER: EMBL / AI638991
  ref <309>: DATABASE ENTRY DATE: 2000-03-04
ttgttttttaaaaaagaaaatttggagataaattaaaaggagtttggcaacagcactacataccagcaagctagctctgggacgtggttacaaaggtgggacacagttagctgcagaaacgcgttcttataaaattaagccttttataccaaaacaccgacctagaactttatggacagaataagagagccaaggatctggtatgctacaaaatgtcattttggtccattacgttggacctctgtactccgagatcgacacttggataagctgagaaggaagtctgtgtccgcttgctcccactttaaggactaacctctttgggttgcccgggagctgattccagattctgggtagtactgcttcctcagcagctgactgggatggacgctgaccttcggcctgccaggactccagaaggcgtctatgctgatctgtttgttttttaaacaaccactcttcccatttcattaaaatgggtttccatggcattgataatgacagagcaccattaagacaggaaaaacaactcgtaaaaaaaagctttctggactaaaggatacttaattgattacttaatggtcggaaaagagaggattt

SEQ ID NO: 13019 - DNA, 462 bp, Rattus norvegicus
  ref <308>: DATABASE ACCESSION NUMBER: EMBL / AI639048
  ref <309>: DATABASE ENTRY DATE: 2000-03-04
ttacataataaaaagtgtatttttaattacaaatctaactgcccatatggggcaacaaattgcagtttctatagaatagcgcaaatgagcaggacttttcccaaaaacatgtaaaatttagttcatcccaggtgccacagatttcatatcagtttatatttcctattaacttatattcattattttaggttttcatgtgatggctataaggacagatctgcactcacaggtaggcagcaaatatacaaagcccctgacttaatttactggacatgaaattcacgcactcaaaataaaaaatgtaactttaaaaagatttcatctgtcatcacataaatcgttcatcataactagttcattaaaaactcataattcacttaaaactgtcacatcaagtaattcctctaaactttttttgatatgtggaggctgagatgcaccctgatttaatagattctgacc

SEQ ID NO: 13020 - DNA, 206 bp, Homo sapiens
  misc_feature (1)..(206): n=a, c, g or t
  ref <308>: DATABASE ACCESSION NUMBER: EMBL / T00057
  ref <309>: DATABASE ENTRY DATE: 2000-03-04
atgaaacgactttggaaaaaggttgggtctggtgtgaagaatgcnaattatctcaaaaagtctgtagaagaagtagcgaaaattgaaaaaggggaaacaaaagtcgtcccaccaaaatatccaactgaaaaatcacgagaagttagcgangaaatcaaaaaagaattagcgntgaaaaatgaaagtttngtgggaaatatgactaa

SEQ ID NO: 13021 - DNA, 312 bp, Rattus norvegicus
  ref <308>: DATABASE ACCESSION NUMBER: EMBL / AI639213
  ref <309>: DATABASE ENTRY DATE: 2000-03-04
ttagtgaatccagccagttggggtttattttgggaaattccattgaattgggcattggccttttccaaaatggaaaattcttccaagggttggccaaaggttaaggcttgtacctttggttgtcccttatttccttgaattttgccttccagttgtttcccttgaacccttaacaagttgaagaacctaaggttgccatgaatttaatgggcaatcaattggaccttaatgtaaaaaaattaaaacccaagtttccaatttgggttttaaatttttttaacaacaacagctttgtgccggttttaatggctg

SEQ ID NO: 13022 - DNA, 358 bp, Rattus norvegicus
  ref <308>: DATABASE ACCESSION NUMBER: EMBL / AI639017
  ref <309>: DATABASE ENTRY DATE: 2000-03-04
ttgtttattaccaaacccaacatttattgagagcacagaaaatcagttggcagaggcccaacttcaatgagcgaactgaggccaggctcagtggggtaggccagccctgaagtcactcactcccagtgagaaaccagctctgggagaggggctgtaaaccttccaggccttactggggtcctccgatgggggaatgtctgaggggcagtgccccggcctggattttaacagtcctcaggtgttgatggggggcagggagctgaggtcagggagcagctccgggtgggggtccagacgggccaggcggctctgctccagggcgatggcctcagctgaatgcttgcacttctcagagcca

SEQ ID NO: 13023 - protein, 342 aa, Rattus norvegicus
  ref <308>: DATABASE ACCESSION NUMBER: SWISS-Prot / AAC84161
  ref <309>: DATABASE ENTRY DATE: 2002-10-01
KKALLALKKQSSSGPASQGGVKRSLSEQPVVDTATATEQAKQLVKSGAISAIKAETKNSGFKRSRTLEGKLKDPEKGPVPTFQPFQRSMSADEDLQEPSRRPQRKSLYESFVSSSDRLRELGQDGEEAEAPGAGDGPPRGFDWSYEEHGSARSSASPPRSRSRDRSHDRSRDRDRDKERDRDRDRDRDRDRDKDKDRDRDRDRDRDRDRERDREGPFRRSDSFPERRAPRKGNTLYVYGEDMTPTLLRGAFSPFGNIIDLSMDPPRNCAFVTYEKMESADQAVAELNGTQVESVQLKVNIARKQPMLDAATGKSVWGSLAVQNSPKGCHRDKRTQIVYSDDL

SEQ ID NO: 13024 - DNA, 426 bp, Rattus norvegicus
  ref <308>: DATABASE ACCESSION NUMBER: EMBL / AI639376
  ref <309>: DATABASE ENTRY DATE: 2000-03-04
ttcctttttaaatggattttataatacagaagacatgtttataatagcgaagaacttttgctataaaaatagttttaaaatggtttaccagcaacccatccaagacgagtacattcattaagaaggcaattgagtgtatttggtgctatacgtagagatcattccgtctgcttgctagttttctcaggactggaaagttgcatactcatcagtccacactggccccgtaacccagtctgctgtgtcagtattcttttcataggaagagtgtcagcccacgtagctctatccttgggtgggtctaggaccatggtatcccacggttggagatagatggccggatgctgcccttgggagcttggttggatcccaaccaagaaattttattttccaaaagctttttgagcataatctcctcttcttggg

SEQ ID NO: 13025 - DNA, 4796 bp, Homo sapiens
ctgggagacgtgcggttccgggtcgctgctcggctcgccggctgggcggtgggggttggtgacgcgggccggggctcacgagaggcccgggaggcggggctttgctggcttcccagagagaggcaggacagaatgctttgacctccaagctgttttaaatctagtagataagccagatcctgtgttgccataagcccttggcccacatttaagtgggaatgcagctagcttggatgtctgaaactttgtaggcgcctctgtctgaatcctgaacacaggcaccaggactactgagagctcgtcatctgtgcaggatagccacacagcaaacatgtttgcaaaactgaagaagaaaattgcagaagagactgctgttgctcagaggccaggaggtgctactaggatcccacggtctgtgagcaaggaatcagttgcctcaatgggagctgactcaggagatgactttgcttccgatggaagcagctccagagaagatctttcatcccagcttctgagaaggaatgaacagatacggaagttagaggccagactttctgactatgctgaacaggtccgaaacttgcagaagataaaagagaagcttgaaattgcattagaaaaacaccaggattcttccatgcggaaatttcaagagcagaatgagacattccaagccaacagagccaaaatggcagaaggactggctttggcattagccagaaaggaccaggaatggtcagaaaagatggatcagcttgaaaaggagaaaaatattctgacagcccagttacaggaaatgaagaaccagagtatgaatcttttccaaaggagagatgaaatggatgaattagaggggttccagcagcaggaactaagtaaaataaagcacatgcttttaaaaaaagaagaaagtctagggaaaatggaacaagaattggaggcacgaaccagagaacttagtcgtacccaggaggagttgatgaactccaatcagatgtcatcagacttaagccagaagctagaagaattgcagagacactactcaacgctggaagagcagagagatcatgtgatagcttcaaaaacaggtgcagaaagtaagatcacagccctggaacaaaaggaacaagagctccaagcactcattcagcagctttccattgatttgcaaaaggtcactgctgaaactcaagagaaagaagacgttatcacacatttgcaagagaaggttgcatccttggagaagagactagaacagaacttatcaggagaagaacacttgcaagaactcctgaaagagaaaacacttgctgagcagaatttggaggataccagacaacagctcttggcagccagaagcagccaggctaaggccattaacaccctggagactcgggtgagagaactggagcagaccttgcaggcctctgaggagcagctccaacagagcaagggcattgtggctgcccaggaaactcagatacaggagctcgctgccgccaaccaggagagcagccatgtgcagcagcaggcccttgctctggagcagcagttcttggagcgcacccaggcgctagaagcccagatagtggccctggagagaacgcgggcagctgaccagaccaccgcagagcaagggatgagacaactggagcaagaaaatgcagcccttaaagaatgcaggaatgaatatgaacgttctttacaaaatcaccaatttgaactaaagaagctgaaggaagaatggagccaaagagaaattgtgagcgtggccatggctcaagccctggaggaggtgcggaagcaaagggaagagttccagcaacaggcagctaacctgacagccataatagacgagaaggaacagaatctgcgggaaaaaaccgaagtgcttctccagaaagagcaggagattctccagctggagcgaggtcacaactctgccctgctgcagatacaccagctgcaggccgagctggaggccctgaggaccctcaaggcggaggaggctgcagtggtcgcggagcaggaggacctgctgaggctgcggggcccattgcaggccgaagcactctcagtcaatgagtcgcacgtgacctcgagggccatgcaggaccctgtgttccagcttccaactgcaggaagaacaccaaatggtgaggttggggccatggatctcacacagctacagaaggagaaacaggacttggagcagcaacttctggagaaaaataagaccataaagcagatgcagcagcggatgctggagctccggaagactctgcagaaggagctgaaaatcagacccgataatgagctcttcgaagtccgggagaaacctggacctgagatggcaaacatggcgccttccgtcacgaataacactgacctgacagatgcccgcgagatcaactttgagtaccttaaacatgtggttttaaaattcatgtcttgtcgcgaatccgaggcttttcatcttataaaagctgtgtcagtgttgctgaacttttcccaagaggaggagaacatgctcaaggaaactctggaatataagatgtcatggtttgggtccaaaccagctcccaagggcagcatccggccgtctatctcaaaccctcggataccatggtcctagaggggactacccaaggatggagctccgtgggttgacactttttctgtgaaaagaacactgacacaccagtctgggtgggtttttaatcactgtaactgcagtattttgtacaagtgtctaaacattgtttacaagactaaggcccacttccctgcaggctgacctgaacctcagggggtagctgatcctgtcattctggtcaccaaacaggagggtcctggcactacccagatttccacagtgctgctaatatcccagctccagccagcaccccatctgcacctgaatcctctaacttcacggtagcacttacagctgaagccatcagcatctggcaggcacacctgagtcaccatgtagcgctgctactggaggtagagacggccctttgagatggtgcccagcaggccaaacccacctgcctctgccaggaacagccaactccatgggaactctatgggagtggcttttaaaaattcagatgagttagaagctttttatcccttcctctcaagaaaatattctttcaccctgtctctcaaaccacctagaactttagaggatccatctttaagggtcggtgtggatgaatgagaaaatgcacctttctgacagtatctccactttacttaagaaaactagcaaatatatgaaaagacccttagtaccaaatacactcaattgcctttttaatgaatgtacttgtcttggataggttgctggtaaaccattttaaactattttttatagctgaagttcttcactactataaacatgtcttctgtactataaaatccatttaactggtgttcttaaaatcagagcgtccagaggaaattcttcctaaaactaggattcctgttcctttgtcttctcactcgcactctggcactgctccctctgaagtgcagtgggatctcgtgtgctttgtcttgattctgtgctgcgctgccgctgggcgatgcagaccacctgtcttctactgaaggacagtccgctgtctccagtgggggcagcagctgtcccccagcctcgatggagacactggggcagtctgccttgtctgtggagctgctctctctccctcatcccaccccaaatacttaaaatgacactacacccagacggcgcccagctggctgcagcacttgtagcatgcacatgactctggtagtaaccaacaaaaacttgttttatggattcctcgtttactgaggaaagggaacatgctggttctggaaaagccacaatattgaatctaaaaggaaaccgtttattgtttgatgaaagtttcactggttaaataaaaaactaaattaataactggagcctctaaatttattatccattatccagtgatggaaagttgtatttctcaatcatgcttagggccaaaataggtatataaaatgtgtcacagaaaaacacgcatttgcaacgttaacctaacgaaatttccatgaagaaccaagtcagggcagcatctccttagtcccagctcaggctctctgccttccagaggccgcttctccagtgactaacctcctcctctggctcctccttgcagacagttatcccttgtttagaacacgaatttccatttacctggtgggaacacgaaacaggagtctcttctgttctgcaagtttgatgggtaagaggtagccttttttcaaagtaggatttcctttttcaactgttccaggaaagaatctctaagactgggtagctcacagccagccaaaggcagctacatttccacagaagcccatccgctgcctccgtggcttctccagccattgaactggtcccacacgcaccccaggccccactcctcggcagtttcaggtgtagctgtggggcccgttcctaggtctgtactcactttagggaggcttcactgactaggctttcctcctgcatgttgaatttccttcagctttaagaggaagagtggaataaatattctaagtgatttaatgcactttgacttgtataaaactttctgtgttagcgacggtatctatagccctttatacgagcgatggatcttgagctctccttccatgttgtaaatagggattgtattcttgaaaactgctgtagcaaattcatctgtggtgcaatacactttttgattaaagctcttcaatccagatgc

SEQ ID NO: 13026 - protein, 767 aa, Homo sapiens
MFAKLKKKIAEETAVAQRPGGATRIPRSVSKESVASMGADSGDDFASDGSSSREDLSSQLLRRNEQIRKLEARLSDYAEQVRNLQKIKEKLEIALEKHQDSSMRKFQEQNETFQANRAKMAEGLALALARKDQEWSEKMDQLEKEKNILTAQLQEMKNQSMNLFQRRDEMDELEGFQQQELSKIKHMLLKKEESLGKMEQELEARTRELSRTQEELMNSNQMSSDLSQKLEELQRHYSTLEEQRDHVIASKTGAESKITALEQKEQELQALIQQLSIDLQKVTAETQEKEDVITHLQEKVASLEKRLEQNLSGEEHLQELLKEKTLAEQNLEDTRQQLLAARSSQAKAINTLETRVRELEQTLQASEEQLQQSKGIVAAQETQIQELAAANQESSHVQQQALALEQQFLERTQALEAQIVALERTRAADQTTAEQGMRQLEQENAALKECRNEYERSLQNHQFELKKLKEEWSQREIVSVAMAQALEEVRKQREEFQQQAANLTAIIDEKEQNLREKTEVLLQKEQEILQLERGHNSALLQIHQLQAELEALRTLKAEEAAVVAEQEDLLRLRGPLQAEALSVNESHVTSRAMQDPVFQLPTAGRTPNGEVGAMDLTQLQKEKQDLEQQLLEKNKTIKQMQQRMLELRKTLQKELKIRPDNELFEVREKPGPEMANMAPSVTNNTDLTDAREINFEYLKHVVLKFMSCRESEAFHLIKAVSVLLNFSQEEENMLKETLEYKMSWFGSKPAPKGSIRPSISNPRIPWS

SEQ ID NO: 13027 - DNA, 426 bp, Rattus norvegicus; identical to SEQ ID NO: 13024
  ref <308>: DATABASE ACCESSION NUMBER: EMBL / AI639376
  ref <309>: DATABASE ENTRY DATE: 2000-03-04

SEQ ID NO: 13028 - DNA, 4796 bp, Homo sapiens; identical to SEQ ID NO: 13025

SEQ ID NO: 13029 - protein, 767 aa, Homo sapiens; identical to SEQ ID NO: 13026

SEQ ID NO: 13030 - DNA, 411 bp, Rattus norvegicus
  ref <308>: DATABASE ACCESSION NUMBER: EMBL / AI639432
  ref <309>: DATABASE ENTRY DATE: 2000-03-04
ttaaccggcccagttaaggcttaagaagggcttggtgggatccaaggaattgggttggccccctttttggcgggcttaaaccagcccttttttttatttattccctttgaagggccccagaaaacccttttaaatggcaattaaaaattcccttgcttggcaaaaccccagccaaaagggtttaattttcttttgaaacctttaaagtaccccggattgtcagggttaattaaatggtaggtgaaaatggtttcaattaaagaaacctttttcttttttaaaccaggggttgggccccaggtgggcttttttccccaaagacaaccttaaaccattggaaaccgtaccttaagttcaggcagcaagaaaaccagcgaatcttttaagcgccctcaaatttaatggtttttt

SEQ ID NO: 13031 - DNA, 315 bp, Rattus norvegicus; identical to SEQ ID NO: 7464
  ref <308>: DATABASE ACCESSION NUMBER: EMBL / AI639465
  ref <309>: DATABASE ENTRY DATE: 2000-03-04

SEQ ID NO: 13032 - DNA, 315 bp, Rattus norvegicus; identical to SEQ ID NO: 7464
  ref <308>: DATABASE ACCESSION NUMBER: EMBL / AI639465
  ref <309>: DATABASE ENTRY DATE: 2000-03-04

SEQ ID NO: 13033 - DNA, 508 bp, Rattus norvegicus; identical to SEQ ID NO: 7346
  misc_feature (1)..(508): n=a, c, g or t
  ref <308>: DATABASE ACCESSION NUMBER: EMBL / AI639102
  ref <309>: DATABASE ENTRY DATE: 2000-03-04

SEQ ID NO: 13034 - DNA, 457 bp, Rattus norvegicus; identical to SEQ ID NO: 7355
  ref <308>: DATABASE ACCESSION NUMBER: EMBL / AI639120
  ref <309>: DATABASE ENTRY DATE: 2000-03-04

SEQ ID NO: 13035 - DNA, 281 bp, Rattus norvegicus
  ref <308>: DATABASE ACCESSION NUMBER: EMBL / AI639396
  ref <309>: DATABASE ENTRY DATE: 2000-03-04
ttaaaatatatcaaagaggtggggtttttattcactcagcagggggagaaaagtacacacagaggggcatgtgccccagcgcgcgacccagggcagcacattgtgtgctttttttcacccactggggggcctcctaaagacgcgtacactctgcactgattggggctactctctgagtttccccatgccccccaaagaccacaagaaaaaaagggatgccgaaaagtccgccaaaaaagacagggccccagtaaataaatctgggggcagggccaaaaaaa

SEQ ID NO: 13036 - protein, 125 aa, Rattus norvegicus [sequence omitted]

SEQ ID NO: 13037 - DNA, 514 bp, Homo sapiens
  ref <308>: DATABASE ACCESSION NUMBER: Refseq / NM_001028
  ref <309>: DATABASE ENTRY DATE: 2001-07-03
cttcctttttgtccgacatcttgacgaggctgcggtgtctgctgctattctccgagcttcgcaatgccgcctaaggacgacaagaagaagaaggacgctggaaagtcggccaagaaagacaaagacccagtgaacaaatccgggggcaaggccaaaaagaagaagtggtccaaaggcaaagttcgggacaagctcaataacttagtcttgtttgacaaagctacctatgataaactctgtaaggaagttcccaactataaacttataaccccagctgtggtctctgagagactgaagattcgaggctccctggccagggcagcccttcaggagctccttagtaaaggacttatcaaactggtttcaaagcacagagctcaagtaatttacaccagaaataccaagggtggagatgctccagctgctggtgaagatgcatgaataggtccaaccagctgtacatttggaaaaataaaactttattaaatcaaaaaaaaaaaaaaaaaaaaaaaaa

SEQ ID NO: 13038 - protein, 125 aa, Homo sapiens [sequence omitted]

SEQ ID NO: 13039 - DNA, 483 bp, Rattus norvegicus
  ref <308>: DATABASE ACCESSION NUMBER: EMBL / AI639422
  ref <309>: DATABASE ENTRY DATE: 2000-03-04
ttctgccccagatttctttattaaggccttgcatttgacccaaatacattaacaggagatggctaagatatagcccctaacacagtacctcccttcctcctagccagggtcaggacagtcggaaaggtttaagatttgagtaatgggagactgtaccgatggaagggacagagaagagtttgcaaatcgttaagtatggggagtggtagaagagaaacagtagatacagataaggtacgggataagaaacaagtcagatgagagaactgggctggtatcggagataaagcagctccttttctccagcgagggagaccaggatctcgagcaccctgcatgtagaccacagttggccctatagtagagaatgacctagtgtcccaaggagctcggggcagtgcatgggcggtaggaaggtacatgtaaagagcaaggggggctggtaaggagttgccatagcaactagtcatcatcgtcgtcgtc

SEQ ID NO: 13040 - protein, 413 aa, Rattus norvegicus
  ref <308>: DATABASE ACCESSION NUMBER: Refseq / NP_058827
  ref <309>: DATABASE ENTRY DATE: 2002-11-05
MKRIYLLVVGLYLLSFSRAEEGLNFPTYDGKDRVVSLSEKNLKQVLKRYDLLCLYYHEPVSSDKVAQKQFQLKEIVLELVAQVLEHKNIGFVMVDSRKEAKLAKRLGFSEEGSLYVLKGGRTIEFDGEFAADVLVEFLLDLIEDPVEIVNNKLEVQAFERIEDQIKLLGFFKNEDSEYYKAFQEAAEHFQPYIKFFATFDKGVAKKLFLEVNEVGFYEPFMDEPSVIPNKPYTEEELVEFVKEHQRPTLRPLRPEDMFETWEDDLNGIHIVAFAEKSDPDGYEFLEILKQVARDNTDNPDLSILWIDPDDFPLLVAYWEKTFKIDLFKPQIGVVNVTDADSVWMEIPDDDDLPTAEELEDWIEDVLSGKINTEDDDNEDEDDDGDNDNDDDDDDDDNSDEDNDDSDDDDDDDE

SEQ ID NO: 13041 - DNA, 1884 bp, Homo sapiens
  ref <308>: DATABASE ACCESSION NUMBER: Refseq / NM_001231
  ref <309>: DATABASE ENTRY DATE: 2002-11-05
agtgccctctgtccactgctctgggccattccccaatcccccctcccacttgagcccctaactcagaatctgggacccaggggcccctccctaccccagctaacctcttctggaccaggagagccaacccagatcccactacctccatgagtgctacagacaggatggggcccagagctgtgccgggtctgcggctggcactgctgttgctgctggtgctagggacacccaagtcaggggtacaggggcaggaagggctggacttccctgagtacgatggtgtggaccgtgtgatcaatgtcaatgcaaagaactacaagaatgtgttcaagaagtatgaggtgctggcactcctctaccatgaaccccccgaggatgacaaggcctcacaaagacaatttgagatggaggagctgatcctggagttagcagcccaagtcctagaagacaagggtgttggcttcgggctggtagactctgagaaggatgcagctgtggccaagaaactaggcctaactgaagtggacagcatgtatgtattcaagggagatgaagtcattgagtacgatggcgagttttctgctgacaccatcgtggagtttctgcttgatgtcctagaggaccctgtggaattgattgaaggtgaacgagagctgcaggcgtttgagaatattgaggatgagatcaaactcattggctacttcaagagcaaagactcagagcattacaaagccttcgaggatgcagctgaggagtttcatccctacatccccttcttcgccaccttcgacagcaaggtggcaaagaagctgaccctgaagctgaatgagattgatttctacgaggccttcatggaagagcctgtgaccatcccagacaagcccaatagcgaagaggagattgtcaacttcgtggaggagcacaggagatcaaccctgaggaaactgaagccggagagtatgtatgagacctgggaggatgatatggatggaatccacattgtggccttcgcagaggaagctgatcctgatggtttcgagttcttagagactctcaaggctgtggcccaagataacactgaaaacccagatcttagcatcatctggattgaccctgatgacttccccctgctggtcccatactgggagaagacgtttgacatcgacttgtcagccccacaaataggagtcgtcaatgttactgatgcggatagcgtatggatggaaatggacgatgaggaggacctgccttctgctgaggagctggaggactggctggaggatgtcctggagggcgagatcaacacagaggacgatgacgatgatgatgatgactagttgctatggcaaccatctttcagccccactggtcttttcatgctctctcctgccttcccttgtccttccctgagttcctccagggagactaggttattctctgccatagagctaactggggtctatatgctgggtgctgagacactgatccccctcatttgatgagcaaatgagctacttttccctagacaccaggccagctctctcttatctgacttctgtttcttatcccataacttacttgtatctattatgtgtctcttccatcactctccatactctttcttgtgattctcctctagccatatatatgggccccatctctgttctgttccctccatctatgcacagctttcccccactctctctaatcctgtatctttctgactgtcctgtccttggccagaaggaagggagaatactgtgtttgggactgtatctcagcaatcacttgttaatgtatttgggtcaaatgagaggcctcaataaagacatctggggcagcatgaaaaaaaaaaaaaaaaaaaaaaaaaaaaaaaaggaattc

SEQ ID NO: 13042 - protein, 390 aa, Homo sapiens
  ref <308>: DATABASE ACCESSION NUMBER: Refseq / NP_001222
  ref <309>: DATABASE ENTRY DATE: 2002-11-05
MGPRAVPGLRLALLLLLVLGTPKSGVQGQEGLDFPEYDGVDRVINVNAKNYKNVFKKYEVLALLYHEPPEDDKASQRQFEMEELILELAAQVLEDKGVGFGLVDSEKDAAVAKKLGLTEVDSMYVFKGDEVIEYDGEFSADTIVEFLLDVLEDPVELIEGERELQAFENIEDEIKLIGYFKSKDSEHYKAFEDAAEEFHPYIPFFATFDSKVAKKLTLKLNEIDFYEAFMEEPVTIPDKPNSEEEIVNFVEEHRRSTLRKLKPESMYETWEDDMDGIHIVAFAEEADPDGFEFLETLKAVAQDNTENPDLSIIWIDPDDFPLLVPYWEKTFDIDLSAPQIGVVNVTDADSVWMEMDDEEDLPSAEELEDWLEDVLEGEINTEDDDDDDDD

SEQ ID NO: 13043 - DNA, 428 bp, Rattus norvegicus
  ref <308>: DATABASE ACCESSION NUMBER: EMBL / AI639204
  ref <309>: DATABASE ENTRY DATE: 2000-03-04
ttccttccttgaccaagttgtcattgagtagagcgttgttcaacttccatgtacatgtgggctttctttcgttaatgtcattattgaagaccagtcttagtgcatggtgatctgataggatgcatgagattatttctatcttcctgtatctgttgagacctattttgtgaccgattatatggtcaattttagagaaggtaccatgaggtgctgagaagaagttatatacttttgttttaggacagaatattccataaatatctgttaaatccatttggttcataaattctgagagtttctctatgtctctgattaatttctctttccatgatctgtccattgatgagagtggggtgttgaaatctcctactcttattgtttgaggtgcaatgtgtgctttgagctttatgaaggtttcttttatgaat

SEQ ID NO: 13044 - DNA, 428 bp, Rattus norvegicus; identical to SEQ ID NO: 13043
  ref <308>: DATABASE ACCESSION NUMBER: EMBL / AI639204
  ref <309>: DATABASE ENTRY DATE: 2000-03-04

SEQ ID NO: 13045 - DNA, 516 bp, Rattus norvegicus
  ref <308>: DATABASE ACCESSION NUMBER: EMBL / AI639247
  ref <309>: DATABASE ENTRY DATE: 2000-03-04
ttatgataggcacaaatctttaattcatctagcctctaaagtactctaaagtactctaaagtaaatcggactatccacaccgtgggcattcagcttctcaagttagttaacaattagcctaaagaaatcctggtacttgaagctggaggatgtgagcctggacaggaatgctgctatctctggatgctgtgaggagacacattcttcttcagagacagagcggagcccgtggaaggcttaagcaagtttgtgaaagacgatgtacctgtgaacatctttctttccacttcttcttgaattttcagaagaattcgctcttgttccaaggcttctatgtactttgaatagcaccaagtgggctgtcggccataggactgcaggactagcaaggactcgctgcctaaagtaggttttggtaagagagcctgtagtacttgcatactgcttgactccagactttgcagctttggcctcttctatgtctgatgttttccttttctgcttatattcttgcct

SEQ ID NO: 13046 - DNA, 3957 bp, Homo sapiens
  ref <308>: DATABASE ACCESSION NUMBER: EMBL / AY009106
  ref <309>: DATABASE ENTRY DATE: 2001-01-22
ggaggcgcgggcagcggggacggcatgcccgagaagaggctcaccgcggagccaccaactattacagaagaagaatttgaagattctctggcaacagatgatttccttgtagactactttaatgaattcctaagccttccaaccttttcagaggcaattagatttaatgcagattatggagtttttgaagtagctaatgatgctccacaatttctggaaaaacaactgaaaaaaattctacaaaaccagcaacctcgaaatcccatttatgatgttgtaaggaaaggaaagaatgaggttaaacctgttcaaatgaatgcccccgatgaagatgagaccattaatgtcaactacaatattatgtgtctcagtcgtgaagaaggtattaagtggatcaaaaaagaaagacttccagcatttctggaaagtgattgttactttgaatacaggttagccaaattggtctcacaagtaagatggagcaagtccggcatgaatttcacagtaggatcaaatttttcttcctggatcgtgaaaaaaccacccagtctaccacctcctgccactgaagaagataatcttgcttcctatactcaaacaaaagattggtttgcattagcaaaacaaagtcagcaaacagtatcaaccttttcgttaccctgttgtgtaccctacaacaaacttaaatcaccagctatttcatctgtttctgagaattttatctttgatgatggagttcaccctaggacaaaaaaggacccatctaaaaccaacaaattgatttctgaatttgaagaagaagaaggagaagaagaagaggtgtctgtatctctacaagacactccttctcaagctcttctgagagtataccttgaaaagaaacaggatgttgatgaaagcctgacaatgcatttctcaacatgtgaagaatttttaagctcctatatatactttattttgagaggagcaattcagcaaattgttggaaagccagttggagaaaccccagactatataaacttcaacaatataacaaaagtgtcatttgatgattgttttgagtctattcatggcaagaattttttaagtgaattagttcaaactacaaaggagaggtcagaagagatagaacaaacaagtttaagttcaaagaatgagagcgctggaccagagagcagggcggactggtgtatttctcataggacttatgacattggcaatagaaaggagtttgaaagatttaagaaatttataagaggtacattgggagagagatattggtggctatggatggatattgagaggttaaaagttcttaaggatcctggaagacatcaaagacatcttgagaagatgaaaaaatgctatctagtgagcaatggagattactacctttctgcagaaatcttatcaaaatttaaactgttagatggatcacagtggaatgaagagcatttaagaaatattcagtctgaagttttaaaacctttacttctgtattgggcaccaagattctgtgttactcattcagcctcaacaaaatatgctagtgctgaactgaaattctggcacctccgtcaagcaaaaccaaggaaggatattgacccttttccacaaatggcaaccctcttgccattaagacccaaatcttgcattccacagatacctgagatccagaaagaagaattcagcttatcacaacctcctaaatctcccaataaatcacctgaagtaaaaacagcaactcaaaagccttggaagcgggagcttttgtatccaggttcttctaaggatgatgtgattgagaaagggtcaaagtacatgtcagaaagcagcaaagtcattcatttaacatcttttactgacatttctgaatgtctcaagccccagctggatagaagatacgcttatacagaagaacctagggttaaaaccgtgtcagatgttggtgccttgggaggatctgacatggaaaatttgttgcaatctttgtatgtagaaaatagagctggattcttctttactaaattctgcgagcattcagggaacaagttgtggaaggacagtgtgtacttttggtttgacctgcaggcttatcatcagcttttctaccaagaaacacttcagccttttaaagtatgcaagcaagcgcaatatctttttgccacatacgttgctccttctgccactcttgacattggactccaacaggaaaagaaaaaagaaatttatatgaaaatacagccaccatttgaagacctttttgacacagcagaggaatatatccttctcctccttcttgagccatggacaaagatggtaaaatcggaccaaattgcttataaaaaggtggagctggtggaagaaactcgacagttagactccacatacttcagaaagctacaggctttgcataaagagacattttccaagaaagctgaggacaccacttgtgaaattggaactggcattttatcactctctaacgtctctaaacgaacagaatattgggataatgttcctgcagaatacaagcattttaagtttagtgatctgcttaacaacaaactggagtttgaacatttccgtcagtttcttgagactcattcttcaagcaggatcttatgtgcggacagacattggagcagttccggagaaataacttacagagatcgaaatcaaaggaaggcaaaatctatatacattaaaaacaaataccttaataaaaaatatttctttggacccaacagtccagcttctctgtatcagcagaaccaggtaatgcatttaagtggtggctgggggaagattcttcatgagcagcttgatgcacctgttctagttgaaatccagaagcatgtgcaaaataggctagaaaatgtatggctgccattgtttcttgcaagtgaacagtttgcagcacgtcagaagataaaggtacagatgaaagacatagcagaagagctcttactacagaaggctgaaaagaaaatcggggtctggaagcctgtggagagtaagtggatctcttcatcttgtaaaatcattgcttttcgcaaagcattattgaatccagttacttcaagacaatttcaacgttttgtggctctaaaaggagatttattggaaaatggtttactcttttggcaagaagtacaaaaatataaggacttgtgccattctcattgtgatgagactgtcatccagaagaagattacaactattatcaactgctttattaattccagtattccaccagctttacaaattgacattccagtagagcaagcccagaagattattgaacaccggaaggagttaggaccatatgtatttagagaggcacagatgacaatttttggggttctgtttaaattctggcctcagttctgtgagtttaggaagaatttaacagatgaaaatattatgagtgttttagagagaagacaagaatataataagcagaaaaaaaaattggcagtcctagaagacgaaaaatctggaaaggatggaatcaagcaatatgcaaatacttcagtgcctgctatcaaaactgctttactcagtgattccttcctaggcctccaaccatatggccgacagccaacctggtgctactcaaagtatatagaagccttagaacaggagagaattcttcttaagatccaagaagaactagaaaaaaagttgtttgcaggcttgcaacctctcacaaattttaaggctagctcttcaactatgtctttgaaaaagaatatgtctgcccacagcagccagaagtgacagcattcttgtgaatgtttacatcctgctgctgataggttcaaggaattctttaaaccagattctgctgacatgagaagctccagtgatttgtttttttgaaggtctgtatcagagcaagcctaacatctaaataaagtttgattctggattttccagggggaaaaaaaaaaa

SEQ ID NO: 13047 - protein, 1252 aa, Homo sapiens
  ref <308>: DATABASE ACCESSION NUMBER: SWISS-Prot / AAG49397
  ref <309>: DATABASE ENTRY DATE: 2003-02-01
MPEKRLTAEPPTITEEEFEDSLATDDFLVDYFNEFLSLPTFSEAIRFNADYGVFEVANDAPQFLEKQLKKILQNQQPRNPIYDVVRKGKNEVKPVQMNAPDEDETINVNYNIMCLSREEGIKWIKKERLPAFLESDCYFEYRLAKLVSQVRWSKSGMNFTVGSNFSSWIVKKPPSLPPPATEEDNLASYTQTKDWFALAKQSQQTVSTFSLPCCVPYNKLKSPAISSVSENFIFDDGVHPRTKKDPSKTNKLISEFEEEEGEEEEVSVSLQDTPSQALLRVYLEKKQDVDESLTMHFSTCEEFLSSYIYFILRGAIQQIVGKPVGETPDYINFNNITKVSFDDCFESIHGKNFLSELVQTTKERSEEIEQTSLSSKNESAGPESRADWCISHRTYDIGNRKEFERFKKFIRGTLGERYWWLWMDIERLKVLKDPGRHQRHLEKMKKCYLVSNGDYYLSAEILSKFKLLDGSQWNEEHLRNIQSEVLKPLLLYWAPRFCVTHSASTKYASAELKFWHLRQAKPRKDIDPFPQMATLLPLRPKSCIPQIPEIQKEEFSLSQPPKSPNKSPEVKTATQKPWKRELLYPGSSKDDVIEKGSKYMSESSKVIHLTSFTDISECLKPQLDRRYAYTEEPRVKTVSDVGALGGSDMENLLQSLYVENRAGFFFTKFCEHSGNKLWKDSVYFWFDLQAYHQLFYQETLQPFKVCKQAQYLFATYVAPSATLDIGLQQEKKKEIYMKIQPPFEDLFDTAEEYILLLLLEPWTKMVKSDQIAYKKVELVEETRQLDSTYFRKLQALHKETFSKKAEDTTCEIGTGILSLSNVSKRTEYWDNVPAEYKHFKFSDLLNNKLEFEHFRQFLETHSSSRILCADRHWSSSGEITYRDRNQRKAKSIYIKNKYLNKKYFFGPNSPASLYQQNQVMHLSGGWGKILHEQLDAPVLVEIQKHVQNRLENVWLPLFLASEQFAARQKIKVQMKDIAEELLLQKAEKKIGVWKPVESKWISSSCKIIAFRKALLNPVTSRQFQRFVALKGDLLENGLLFWQEVQKYKDLCHSHCDETVIQKKITTIINCFINSSIPPALQIDIPVEQAQKIIEHRKELGPYVFREAQMTIFGVLFKFWPQFCEFRKNLTDENIMSVLERRQEYNKQKKKLAVLEDEKSGKDGIKQYANTSVPAIKTALLSDSFLGLQPYGRQPTWCYSKYIEALEQERILLKIQEELEKKLFAGLQPLTNFKASSSTMSLKKNMSAHSSQK

SEQ ID NO: 13048 - DNA, 498 bp, Rattus norvegicus; identical to SEQ ID NO: 7342
  ref <308>: DATABASE ACCESSION NUMBER: EMBL / AI639076
  ref <309>: DATABASE ENTRY DATE: 2000-03-04

SEQ ID NO: 13049 - DNA, 498 bp, Rattus norvegicus; identical to SEQ ID NO: 7342
  ref <308>: DATABASE ACCESSION NUMBER: EMBL / AI639076
  ref <309>: DATABASE ENTRY DATE: 2000-03-04

SEQ ID NO: 13050 - DNA, 381 bp, Rattus norvegicus; identical to SEQ ID NO: 7420
  ref <308>: DATABASE ACCESSION NUMBER: EMBL / AI639315
  ref <309>: DATABASE ENTRY DATE: 2000-03-04

SEQ ID NO: 13051 - DNA, 394 bp, Rattus norvegicus
  ref <308>: DATABASE ACCESSION NUMBER: EMBL / AI639137
  ref <309>: DATABASE ENTRY DATE: 2000-03-04
ttcttaaatggaatttttaattttaaaggaaaggtggcccccttaagaccggatttggttccaaaatttcctttgggggtgggctttttaaagggaaaggccttaaaaaaaccggaaagaaccgaaaagctgggtcatttaattaaaagggccttaccttttaaaaaagcctaaaacaaaatttctatggtgaaatctacttttctatttaggaagcaattctttttaaaaaaattaatatcctttcggtttttaataacggaccttggtttttggttgaactttaaaccttggattggcctttggaataatttgggacaagggattgaagggagtttaaggggggcccaaatgcctttaggacccaaagaaggctttgagaacctggaccctt

SEQ ID NO: 13052 - DNA, 432 bp, Rattus norvegicus
  ref <308>: DATABASE ACCESSION NUMBER: EMBL / AI639345
  ref <309>: DATABASE ENTRY DATE: 2000-03-04
ttatttttttactttttttttcaaagcggccgggattttttccccaaaaaaaaccggaaaaaaggcccccaaaccagcccaacaacaaaaaaaaatgacgcccgtgaaaaccagaaaaagtacactcccaaggggacggcagaaaaaagtatcaaagcctcccatggggggggggggggaaagggtccccagaaagaaaaacaattaacattttggggcccttaaaaaattaaaaaaaaaccctgcctgggggggcttcgggaaacctaccacggaaagagagtgggggagaaaaaaaattggataccaccccatttccttaatggacccaatgagggaactgccgaaaaaactaataggtgtccaaaaaacaaccctgggggaccccggggcctacaaagggggcccccacggtctaaaacatttcagggg

SEQ ID NO: 13053 - DNA, 413 bp, Rattus norvegicus; identical to SEQ ID NO: 7470
  ref <308>: DATABASE ACCESSION NUMBER: EMBL / AI639471
  ref <309>: DATABASE ENTRY DATE: 2000-03-04

SEQ ID NO: 13054 - DNA, 413 bp, Rattus norvegicus; identical to SEQ ID NO: 7470
  ref <308>: DATABASE ACCESSION NUMBER: EMBL / AI639471
  ref <309>: DATABASE ENTRY DATE: 2000-03-04

SEQ ID NO: 13055 - DNA, 376 bp, Rattus norvegicus
  ref <308>: DATABASE ACCESSION NUMBER: EMBL / AI639222
  ref <309>: DATABASE ENTRY DATE: 2000-03-04
ttataacagggttcattttttaatggacattttaacaaaagctttttagttaaaaagaccaaagcccaatgtattcttggatttttaaaaattttccttttttggttaaactttttttccctaaactggggcaacggtcgcaaaatgaacaggacccacaggaggccccagcccagcgggttgagttggcccaacagcccctaaaattcaaaatagggtttcaattttgaatttgtgtcaaaaccttttaaaaaaagccctgccagaagggttaaaacttgacccccgcttttttaaagggggcattgattttaatcttcgggcccggtactttgttttacttcaagaagagggtgggttaaattccttcaagctt

SEQ ID NO: 13056 - DNA, 335 bp, Rattus norvegicus
  ref <308>: DATABASE ACCESSION NUMBER: EMBL / AI639475
  ref <309>: DATABASE ENTRY DATE: 2000-03-04
ttcggggactccatttatttgctggtctaatctgaagggcaagtcaaagtaaaacaactttttaaatggaccccacttccacccacccccaaagtggactgtttgattaagtgaccattctgattggcttccaagtgcctcctctccagtccgtgctgaggtgcttcaaggatgtgccgagatgcatccagaaagaatccttcgcagttgttacgatgtaccatgtcaatctttgagtgctgctcctttaacttcattattatgcccgggtcgtccttcttgctggccattaccaatctgaacatctgctctcgatacttgctcattatcagttc

SEQ ID NO: 13057 - protein, 253 aa, Rattus norvegicus
  ref <308>: DATABASE ACCESSION NUMBER: SWISS-Prot / BAB23951
  ref <309>: DATABASE ENTRY DATE: 2001-06-01
MSCTIEKALADAKALVERLRDHDDAAESLIEQTTALSKRVEAMKQYQEEIQELNEVARHRPRSTLVMGIQQENRQIRELQQENKELRTSLEEHQSALELIMSKYREQMFRLLMASKKDDPGIIMKLKEQHSKIDMVHRNSCEGFFLDASRHILEAPQHGLERRHLEANQNELQAHVDQITEMAAVMRKAIEIDEQQGCKEQERIFQLEQENKGLREILQITRESFLNLRKDDASESTSLSALVTNSDLSLRKS

SEQ ID NO: 13058 - DNA, 3019 bp, Homo sapiens
  ref <308>: DATABASE ACCESSION NUMBER: Refseq / XM_043922
  ref <309>: DATABASE ENTRY DATE: 2002-08-01
agggccccgccctgccttctggggcaaagcggagagtggtcggttctgccccacagtaacgcgaggaaagaaatctcgcgaggctggagttctccgggagcgccggtcggaggcggtcggcggaggtgtctaccccgccggtgatggcgttgaacgccactggcttcccggccttccgtccgctgcctccgtccgattctgcgtctgcttgctgaggaggcggattaggggggcgcggagtctcttcccttgagtgcataggtcccggttggtagagggtttgagtccgcatcgccacagctgaaggctgcgagggactaagagcagaatatatctttagaaatgagttgcacaattgagaaggcacttgccgacgctaaagctcttgttgaaagattaagagatcatgacgatgcagcagaatctctgattgagcaaaccacagctctcaacaagcgagtagaagccatgaaacagtatcaggaagaaattcaagaacttaatgaagtcgcgagacatcggccacggtccacgttagttatgggaatccagcaagaaaacagacaaatcagagagttgcaacaagaaaacaaagaattacgtacatctctggaagaacatcagtcggccttggaacttataatgagcaagtaccgagaacaaatgtttagattgctaatggctagcaaaaaagatgatccgggtataataatgaagttaaaagagcagcactccaagattgacatggtacatcgtaacaagtccgaaggattcttccttgatgcatctcgacacatccttgaagcacctcaacatggactggagagaaggcacttggaagcaaatcagaatgaactgcaagcacatgttgaccagataactgaaatggcagcagtaatgaggaaagccattgaaattgacgagcaacagggttgcaaggaacaagaacgaatatttcaacttgaacaagaaaacaaaggcttgagagagatccttcaaataactcgagaatcatttttgaacctaaggaaagatgatgcgtcggaaagtacttctttgtcagcattagtgaccaacagtgatttgagtctgaggaagagctgaagagtttctgagtctgtgagcttcttacatggctccaaatggtcaaataagtgaatgaatgaatggacagaaaattcaatcctttatttttttctctgtaaatatgtacagtgcacgggctatgagatagcaacaaaaaatgcatagttaatggtcatagactttattccaaaacataattggaaaatagaaactgagccattgccaaatggtaaagaaatgaaaagttttcacagtgactactgaatataccaagagcttttggcagtactgctggctttctgggtgattaattaggtaaacttgaatattcccagtaaatgtttgagaatgcataaaattataccaatttaaaaatataaatttttgccactgttttgtgaacggaggatttgtacgctaaatttcatccttatttggcgtcaaagttgatgcaaagtttatgtaccatgagacttctagtgattgcctactttcacatttatttaaatttttgtgaaagaaaatacagttttaaaggctataggaatgtgttatatgtaccttaaacagataatttaattttagcaatttatcataactgatacttagctaacaattgtccataacttgtttaagtgtaagaaataccatttcaggaatgaaaaagaaggaatactactttctaagaaagaagatcttataatagacatatttagtaggttaaactactcctttgaaagaataagttttggttcaaagtcaataatgaagacgagatttgtttttctcttctctggctgatttttaaggatattatgtagttcatttagttaacagaattgaaatgtttgatatggcaagataggtatggtaatttcaaagtgaattgggaattcctctggctcatagaacccttttttttttcctttaagtattcttgagatacaaaaaaaaaaagtaaatacaatttcaaaaaaaaagttccggatctgtttttaagctccatctggtcctcataacctgcaagatttttcttaaaacctttcagctgaaagtgggggtaaaggtggagtaatctgtggatttgtttctgttgtcttttaaaatgtcaaatatataatatgtaatttttttaaaaaccaccagatacagaaatgtgctttaacatcagttgaaacctaaattttcttatgttgtggtgattgtattaaaaagggataaaagaagagtgtcaaacatggttaaatatattgtactcatttatgttgaatacgtattaaaattaagacaaatggaaaattatactttgagtatataatttgttaaatattactttatatggtaattttatgtataatttcatatattggtaaaattcaaaactacacttgagaatttttttatcttaagtttggggtgaatggggtggatgagactgattgaatagaaaagggctaatggcccaaacattatatagatttctttttttcagtcagaggccttatttgatattttataaataaatgacagtttttatttttaaactttttattgtttttgggaaagtattccttaatttaatgacacattcattcagatacttcttatccctgctaataaaggaaatctatttcaagctacaccattgagattaagtctgaggcagttcattgaggcagctctactataaaagcttacttgataaataattatttttgtaaacaagttgggttaacttattcttcgtctttttgcttggatatgaatttaaggtcttcatgtttaaagacatttactttgttatttagtgacacatttccatcctattttttttttttttttggttgttgttaaacagaaccttaagtttatgtttgaggtatgtactgcataggaacctattttattattaaagatgaatgattaaaattgg

SEQ ID NO: 13059 - protein, 253 aa, Homo sapiens
  ref <308>: DATABASE ACCESSION NUMBER: Refseq / XP_043922
  ref <309>: DATABASE ENTRY DATE: 2002-08-01
MSCTIEKALADAKALVERLRDHDDAAESLIEQTTALNKRVEAMKQYQEEIQELNEVARHRPRSTLVMGIQQENRQIRELQQENKELRTSLEEHQSALELIMSKYREQMFRLLMASKKDDPGIIMKLKEQHSKIDMVHRNKSEGFFLDASRHILEAPQHGLERRHLEANQNELQAHVDQITEMAAVMRKAIEIDEQQGCKEQERIFQLEQENKGLREILQITRESFLNLRKDDASESTSLSALVTNSDLSLRKS

SEQ ID NO: 13060 - DNA, 468 bp, Rattus norvegicus
  misc_feature (1)..(468): n=a, c, g or t
  ref <308>: DATABASE ACCESSION NUMBER: EMBL / AI639387
  ref <309>: DATABASE ENTRY DATE: 2000-03-04
ttgataaaaccatgtttattactctgctctgtgttccacacaggtttacaagacaaccgagtgtgaatgacaaacattttgttcttcgaaactctgcagtgggactgtgaacaccagccccaccgcaccctgacaatcacacagtgagggtgaaatatcagcaggggtgacagagcaggtctcggccagcagtccccatctgcagcaaaatggtcacgggctaaagcatcctagacaaacctatcagcacccatggtgcacttagaattgaacatagccacatctggtgaatcttctcacttcttccttctctttgntgaatacagtttttcttcaagagggactgggactatgccgtcacactcttttacttcctgggtcaagaggtgtttcacaatatttggtctaaccacatcagtgtctcgtgccaagtgttccagcatgctttccacaagcattgttggggca

SEQ ID NO: 13061 - DNA, 774 bp, Rattus norvegicus; identical to SEQ ID NO: 4229
  ref <308>: DATABASE ACCESSION NUMBER: EMBL / AB049641
  ref <309>: DATABASE ENTRY DATE: 2001-06-14

SEQ ID NO: 13062 - protein, 178 aa, Rattus norvegicus; identical to SEQ ID NO: 4230
  ref <308>: DATABASE ACCESSION NUMBER: SWISS-Prot / BAB40846
  ref <309>: DATABASE ENTRY DATE: 2002-06-15

SEQ ID NO: 13063 - DNA, 1086 bp, Homo sapiens; identical to SEQ ID NO: 4231
  ref <308>: DATABASE ACCESSION NUMBER: Refseq / NM_014078
  ref <309>: DATABASE ENTRY DATE: 2002-05-30

SEQ ID NO: 13064 - protein, 178 aa, Homo sapiens; identical to SEQ ID NO: 4232
  ref <308>: DATABASE ACCESSION NUMBER: Refseq / NP_054797
  ref <309>: DATABASE ENTRY DATE: 2002-05-30

SEQ ID NO: 13065 - DNA, 250 bp, Rattus norvegicus; identical to SEQ ID NO: 4247
  ref <308>: DATABASE ACCESSION NUMBER: EMBL / AA799448
  ref <309>: DATABASE ENTRY DATE: 2000-03-03

SEQ ID NO: 13066 - DNA, 250 bp, Rattus norvegicus; identical to SEQ ID NO: 4247
  ref <308>: DATABASE ACCESSION NUMBER: EMBL / AA799448
  ref <309>: DATABASE ENTRY DATE: 2000-03-03

SEQ ID NO: 13067 - DNA, 553 bp, Rattus norvegicus; identical to SEQ ID NO: 4253
  ref <308>: DATABASE ACCESSION NUMBER: EMBL / AA799449
  ref <309>: DATABASE ENTRY DATE: 2000-03-03

SEQ ID NO: 13068 - protein, 375 aa, Rattus norvegicus; identical to SEQ ID NO: 4254
  ref <308>: DATABASE ACCESSION NUMBER: Refseq / NP_032698
  ref <309>: DATABASE ENTRY DATE: 2002-08-18

SEQ ID NO: 13069 - DNA, 2510 bp, Homo sapiens
cttgctcgcggagagaggagctaggagcctcggccaatgggagccggcgttgttggaggccacggcggcgcagccccaaagcgagcgaagctagggtcgccgccactgccgcaggaggcgtgaggggataaaaacattcagatggcagatcacagtttttcagatggggttccttcagattccgtggaagctgctaaaaatgcaagtaacacagaaaagctcacagatcaggtgatgcagaatcctcgagttctggcagctttacaggagcgacttgacaatgtccctcacaccccttccagctacatcgaaactttacctaaagcagtaaaaagaagaattaatgcattgaaacaacttcaggtgagatgtgctcacatagaagccaagttctatgaagaggtacatgacttggaaagaaagtatgcagcgctataccagcctctctttgacaagagaagagaatttatcaccggcgatgttgaaccaacagatgcggaatcggaatggcacagtgaaaatgaagaggaagagaaattggctggagacatgaaaagtaaagtagtcgtcacagaaaaagcagcggcaacggctgaagagccagatcccaaaggaattccagagttctggtttaccatcttcagaaatgtggacatgctgagtgaattagtccaggaatatgatgaaccaatcttgaaacacctgcaggatattaaagtgaaattttctgaccctggacagcctatgtcttttgtgttagagttccactttgaacccaacgactactttaccaactcagtcctgacaaaaacctacaagatgaaatcagaaccagataaggctgatcccttttcctttgaaggtcctgagattgtggactgtgacgggtgtactattgactggaagaaaggaaagaatgttactgtcaaaaccatcaagaaaaagcagaagcataagggtcgaggcactgttagaacaattacgaaacaagtacccaatgagtcctttttcaacttcttcaatccattgaaagcatccggggatggagaatcactggatgaagattctgaattcacattagcctctgattttgaaattggacactttttccgtgagcggatagtcccgcgggctgtgctgtacttcactggggaggccatagaagatgatgacaattttgaagaaggtgaagaaggagaagaggaggaattagaaggtgacgaggagggagaagacgaggatgatgcggaaattaaccccaaggtgtaatttttgtctgttaatcattcatacgtttctagaaggaacccagccagccggcggaatgcaagcagcagtaggaagcggaggcgggtgcctggcagaccggctgtcgggactccaggcctgtgggcggggcctcggtccttgccgcagcacaatcccgtggacagagcttactccatctaactcgttttcaagtgcatgattttcactttcacttttcctttttccttattattttgcttaacttgtacagtggcaactgaaatgcatttcagaaataggaggtttcgtccagcaccctctgcagccttggtgcctgtagctctggacttccctgggcctttccctgtgggagggccctgtagaccacatcagggtggggtgggggtcacttggcaaaaagggccgaggtctggtgatgtggttcccaggatctggaacctctcccacccctcctgcagttggactgaattcttccctttcatccgaagaaacccacttgctgtttccagccgctgaatctgctgagtgtgcagcctgcatcacctgctgtatgccgatcatctcagaaagggctgtgtagagtagggccctgttctccttaggatgttgcttcttcatttttttttttttttaggggtgggtcagggttgtgacacaccagcccaggtgagagctgctgcgggtcacctcatatttatttatcccttcttgcctgtgaggactgcggcttttcgctgtggctcgtccttaacgtttctgaaccaccttggtgccctgagcaggaagatgtgccacttcctagcaggcgcaaggcctgtgcggaagaaacgccgctccctgccaccagggctgaagatgcgagcccgtcctcatgacgcaggcgccaccctgctgccggagccgggcttcggcagtcttctccactgagggactgggctgggaagtcctgcgtttcagtggagcgtatgagcgtcaagtcctgctttctcagtagccccattgcggggccccaccattcatcctgtctgaaggtcctgggtttggtgtgaccgcttggcggctggtgggtggggttttcaagtgggtgacggcgctctccggcagccggggatggccgtgtccgcactgaccaggcctgtggagagtgctcggcctaaccttagaacacatttgtaactgaatacagtgttttcaatttgtacagaatagttagaatattctattaaagtggtgaaacattg

SEQ ID NO: 13070 - protein, 375 aa, Homo sapiens; identical to SEQ ID NO: 4256

SEQ ID NO: 13071 - DNA, 553 bp, Rattus norvegicus; identical to SEQ ID NO: 4253
  ref <308>: DATABASE ACCESSION NUMBER: EMBL / AA799449
  ref <309>: DATABASE ENTRY DATE: 2000-03-03

SEQ ID NO: 13072 - protein, 375 aa, Rattus norvegicus; identical to SEQ ID NO: 4254
  ref <308>: DATABASE ACCESSION NUMBER: Refseq / NP_032698
  ref <309>: DATABASE ENTRY DATE: 2002-08-18

SEQ ID NO: 13073 - DNA, 2510 bp, Homo sapiens; identical to SEQ ID NO: 13069

SEQ ID NO: 13074 - protein, 375 aa, Homo sapiens; identical to SEQ ID NO: 4256

SEQ ID NO: 13075 - DNA, 553 bp, Rattus norvegicus; identical to SEQ ID NO: 4253
  ref <308>: DATABASE ACCESSION NUMBER: EMBL / AA799449
  ref <309>: DATABASE ENTRY DATE: 2000-03-03

SEQ ID NO: 13076 - protein, 375 aa, Rattus norvegicus; identical to SEQ ID NO: 4254
  ref <308>: DATABASE ACCESSION NUMBER: Refseq / NP_032698
  ref <309>: DATABASE ENTRY DATE: 2002-08-18

SEQ ID NO: 13077 - DNA, 2510 bp, Homo sapiens; identical to SEQ ID NO: 13069

SEQ ID NO: 13078 - protein, 375 aa, Homo sapiens; identical to SEQ ID NO: 4256

SEQ ID NO: 13079 - DNA, 662 bp, Rattus norvegicus
  misc_feature (1)..(662): n=a, c, g or t
  ref <308>: DATABASE ACCESSION NUMBER: EMBL / AA799464
  ref <309>: DATABASE ENTRY DATE: 2000-03-03
aagaacaagcactttattagaaatatgttccataaagagcacaaatttagttagaactataaaatgccacttcatgggatgtcagcattgtcatattctattgctggtgtctgtcatgctaaccatgaagtatctttgtattaaacatgcaaaaagtaaggccagggaggttagttaacctgctctagaactcaatccattagtggcagaaccatgacccataatcttttgagttgcaatgcatttcactcagtaccaaagtgacaacctcaaaaccctgacaatgtcactttatctttcctcttaatgaaaagtcaactcttctaccagccactttccagtggtattttggtttcttttagtatcaggatcacagtatataaccaggggaaaataaatgttcctggggactcaaagacacanagaactgggaaaatgggtatgtccctgaagaatggtttcaatttgggaattgaatcaactggtttcagggaaaatctaaaatccattaatagaattagaaatgaaaagggtanacaacagactggggggtatggctcaatggtanagcaactgcctagtatatgcaagggctttcggttcaatccccaactcgacaaaaaggggaggaaaagccatttacatggctgttgccccgaatc

SEQ ID NO: 13080 - DNA, 18678 bp, Homo sapiens
  ref <308>: DATABASE ACCESSION NUMBER: EMBL / AB026906
  ref <309>: DATABASE ENTRY DATE: 1999-12-10
gatcacgaggtcaagagattgagaccatcctagccaacatggtgaaaccccagctctactaaaaatacaaaaattagccgggcgtggtggcatgcgcctgtagtcccagctactcgggaggctgaggcaggagaatcacttgaacccaggaggtggaggttgcagttgagccgagattgcaccactgcactccagcctggcaactgagtgagactctgtctcaagaaaaaaagaaaaaaataataataaggctgggcgcggtggctcatgcttgtaatcccagcactttgggaggccaaagcgggcagatccatgaggtcaggagtttgagaccagcctggccaacataatgaaaccccatctctactaaaaatacaaaaattagccaggcatggtagcatgtgcctgtagtcccagctactcgggaggctaaggcaggagaatcacttgaaatcgggaggcggaggttgcagtgagctgagatcacgccactgcactccagcctgggcaagagtgagactccatctcaaaaaaaaaaaaaaaaaattgtccccatgtagacagcatgatattatgaagtgtttttggaaaagtgcttcatagctaaagagcagagtgtaagagttcgttagtgtttcttaaggaaagcaatggcaagttctcttacaaatggacaaaataatcttgtatgtctgaagtgatagtgtacagtacaggaaatgtagctgttactgagctataatgggggcttggttctaccatatctctactttgtgtttatgtttgtgtatgcatgtactccaaagtctttctaatgttgctttaatttccaaaaatgtatgcattgctttaacaatacatgtgatgtgtcatattacagatggggtcacagtggttataaagagttataccctgaagaatttgaaacagacaggtaaggaaaataggcttactgaaagaaactaagatggtacaaaatctgtattataaattgatttcttaacttttacgaagaatatacttgccatcaaaaatgtagctagagaaacaataggtgatttagttaggaggtgatccctgttttcccattctctggttgatgtttggcatgtctgtaagcattttggtttttatatatagtattccatacagtaactcagtatggcagcttagaatttttaccttcattttaaagatgaggaaacaaaaactcaatgagaatattaaagtgttaaagtatacattaaagtgcttatttaaaattcagatgttaacctcaattttttaatctagaatgcaaaatattaaaataatacgctttttttttacataaaagcttctattttttaacttttcttattagtagtgatcagcaagatattaccaacgggaagaaaacatctccccaggtaaagtcatctacccatgaatcccgcaaacacaagaagtcaaagaaatcccacaaaaaaaagcagaaaaaaaggtcacacaaaaaacagaagaaaagcaaaaaggaagccacagatataacagcagattcctcgagtgagttctcagaagaaactggggcttctggtacaaggaaagggaaacaaccacataaacgcaagaaaaaatccaggaaaaagtctctcaaaaaacctgctttattcttagaggcagaaagtaacacttcacattcagatgattcagcatccagcagttctgaggaaagtgaggaaagagacactaagaaaaccaaaaggaaaaagagagagaaaaaagcccatacctctgtagccaacaatgaaatacaggagaggacaaacaaacgcacaaattggaaagtagctacagatgaaaggtctgctgagagctcagaggatgactaaatgggaaacacttttgttttccacatgactgtggatatttacagttcttactccttgtggttttgccagtgactcttgttcagcacggggcctgaggtcagagctgtcttgtgccatctgtatgttctgacagacgtcttgtcttctattttggcgttaagcttgatccccttttcttgttaaaagggaatctggtattttgttatgaaggtttcttgaagagattatttttttttgcaattaattacgtttagtgtagagtgcatatacagcaaattaaaggacccagaaagctggatccaatagtgacctgggtacaccaatcggaatattgaatttggggaagtcaagggctgggatcaagaggtggattggaactaatgccatgtaggatggtatgacaaggcaacactgtattgctctctgtttatatagcaggtgtcacaactaacttgtctttagccttggtgctttgatccttctatattttgaccccacaggtgtggtccggtttacttaatcaggacatgggcctaagaacaaaccttttcccttcatgataacatccatagacaacttattagaagggactagagtttttgcaaatttccctgctggatggggcctatagctatacttagtatatgcctaaacatggtaattggatagtaaatggttttctagttccattgctgtatatttgcctaaatggacttgtgttcaaattatttcttcaattgtcatagataatcctgtaccaaatggggaagaattaggaaataatcatgttgtctaatggtactctggattcagggcagcaactgccatttaaatgttgtcttgttcatttctaaatctgttcatgaagtttaggttttccctgaaactaagttgaattatttccaaaatgaaacaggcttctcagggacatatccacttcttcccagtctgcctttggattaaagcaccaagcagagaccacattaattccctttgctatactgtgatccttagtatgttaattcttaagaaaccaacatatcactgaaagaaggctggcagaacgcaagtgcattttttcactgtgggaagaaagatcaagtgacgtattattttttcctggttgtcacttaatgggctgagtaaaaagcttgaaaactcagactttcggtcttggttctgccactcattggttatgaggaggcccagagcaggtaagttcaccttcctggccttactttcctgatgtgtaatacggaattacttcacagtagcatgacagtataagacaccagcagtagatacaactatgatgacattccatgagttggtatttttagttctaactgctaaatttgttctctttacgggacagatttctaataaagtgcttggtcttaaaatacatggttggacagagtgccctatcccttaactatgagcaggtgctaccttttgggatatttattttaaattttaatactttggtactcaattgtcagtgttccatggtgtgtatttttatttttgggattagtgggggtctaaagggagaagaatagtctctaattactacctcttaacctaaagcaattattttgttcctggagcaagttaaatctttgttggaaggagctttggccatatattttttagcatgcattgtttctgtgccctgaaagtacctgaaaggttttaagcacagactcaggaaaatgtgccagtagaacaggccatctccaggaaattggctctatttgggtcctgaccttcccttcctcccaagttagcaggcttgttcttttgcaaggaatacacatcttgccttttttttttttttttttttgccatgttttccttttcttggtcatgtataagcaataaagctgttttttgttcttcatctttcttaaccccaaattttcttctatgccttaggcttcgatggttcttccaacccccttaatatggcttagggtggtttttcaaaacctacaatcccccatttgcactactggccatggaacatttatttctagtgttcctgccaatcagagatctctatattaaattctaaaatgggattaaaagaagagttggagaattcacacttattgagtaactgatgtcatacaacctggaatttctgaattccaaataaataaatttcactctttgaacatttcatcttttactttttagcaccaacagacttgataacagcctgatgctgatctgacaatgggttgatagccttcccccactgacccttaaatctgcttagtaacaagtcctttgcttctgtcattctcctgggggatggcctactgccctcctttctgtacaatctgggcaaaccgactggtgatggcaagagtggtgtcaatgaagcggtctacacagctggagagacaattttcagtgcgagagtctaggcgattccctggcttctccacacatttatcccaacataactccatgaagtgatgcacctaaaaggaaagaaaaatagtaaccattggggtctgcagataggcctaactcttgtttattaacttctcactttttgacacctgacaaaaccattctttaaatcaaccacggagtcactttgggctcttctctttcttcatttcctaattagtcaccaatattgatccagatcctcgtccctacagattgtacattctcaggtaggactaataaccttttatattccccaaagtagctagcaccattgtgaaccaactagggaaccaattaattttcccaaactattgcactcattttattccaaacctatcccctagacaaggtaattcttccattaaccttttgggggttatggatccactccccagaaaaatgcacatacaggcacagaaattatgtgcactgtcattagaatgttcagggcccaaagatttctagccagggttcttgctggtcatccgagcaccctcttcctcccacccaaaaggaaaaaaccattttaccaagagcttactatttgtgaggctgggtactaagaaatcagttctctctaaggtcctcaaggatagctgtcatcacctcccatttaagaggcgtgattatgtagtccaaggtcatgtagccagcaagaagtcaggccgcgttagaaccatgtccgaagggctccaaacccttgttctacatccatagtctacagcgactacttcagagtccaccttcctccgataatgttctagtcgttttcaaatacattgtcgcatatgatcctcacaatccagtgaggcagtggggtgacggcgaaaccaaaacccacagtggatgagtatcttttctacgggcacgtggcctgcaaggagcagagggaggatgagaacccagatctttcgaatgccagcccagtcatgtcgccggctaactagtctcccgtacccttgcgtcgcccaaatcttccctgctttacaccttttcttttctccacgctacgcttatatacctggcacctgagcactaccggtcaccagggacaggagagccataactttgtctttcgtgaggggaatgggatgcagccgggatcgagcaccagtgagccgccagtgtacagacctccgagcgtgcccaggaccaccaaggaaggtgaaacttcctttcccttcaccctccccgtccccgcacctgtgcagtaaactgcgccttctgctgctcggcggccaccaggcgctgcaactccgcttcatcggcttcgcccagctccgccattgttcgcctcaggctcgccaccttccgacagctgtgtttgcgcatgcgcgacgggtgtgcaccgcctctcgacttccggttcacccagcatttcctcttccctgttttctttcgtcgtcgtgggtgggaattgtcgcctaagtggttccgggttggtggatgaccttgagccctcaggaacgagatggcggttctctggaggctgagtgccgtttgcggtgccctaggaggccgaggtgaggggtcttcccaccctgaggtgcttagcgtagcctccagccagggaaggggatggaagtgaggactcatctgccgggtgggagatctcttgaggagaagaaaataccgaaatcacagcaatgaccactgtagtctaggggtccagatgtttacccgaaggtatatttcacttgctgtgagctgacgagttgagggaataatcagaaagagagctccctctggaagtcgcagtcctgatgaggctaatccacatagcagttctgttttctccccgttcactgtccctagaatgctccccactcgctcccaccctgagtcgggaaagagggttaggagcttgcccatttcttctggagttggtgtgtttggatgtgggagtggaggggggatcagttcgaaaatcatttaacctgggcatttgtgttacctcaggtactgtagtaatgctaggatacaaatgtgaagaaaacgtagttcccgccctcaacgagctttcattctgatgaggaaaacactgtcatagtagtccgggcaagatgaggtcctgaactaggaaagtagcacaaagaaaagaagattgtctcaagaactgttaaagagatacgccaataggatttggcgattgaatttaggggaaaagtctctcatgatttccagattactgagttaggttaaagaatgcctgaggtgtcattaaataaagtagggaacatgcagatgttccctggtcttaacttcacagtaaccccagtgaaatagatgctatcttcattttacaaataagatgttatcccctatttattgttaagtagcttacctatggtcatttagaaagtttgtcagtcctgttaaaggagaggttcttatgatcatcctaatgactctttcctcagctctgttgcttcgaactccagtggtcagacctgctcatatctcagcatttcttcaggaccgacctatcccagaatggtgtggagtgcagcacatacacttgtcaccgagccaccattgtatgttctctccatcgctgctgctttctgggctctagccatctttaccttcactaatggtcatgcctttagcaggacttcctacctgtaggggggactcttgtgtccaactttgtcaaatgaagacctagtttacacctttgggcagacagtgccattatggttgaatgatgccatttataatcatagaagaccttctagcctaagtctttacaaatttttttcttttgttttctttttttttgagacagagtctcgctctgttatgcaggctggagtgcagtggtgcgatctcggctcactgcaacctccaccttctgagttcaagcaattctcctgcccctgcctcccgactagctgggattacaggcgcccaccaccatgcccagctaagttttgtacttttagtagagacgggtttcaccgtgttggccgggctggtctcaaactcctgacctcctcaaactcctgacctcaggtgatctgcccacctcagcctcccaaagtgctgggattgcaggcgtgagccaccacgcctggaccactaacttacattcataaggtgtctgttcacttcactgaaccaagactggcttaattctgtagcaatacagcaattctgttttttatccatcttcttggatctgtcttctaatcaatatgtaggcattgagatacccttgtgctaaaagacttcaaaaaacagagataaagccttcaaaaaacagagatagcttctctcaactactattttgatattttacttcctttgtactcagagttatatcctatatgtacactgcctgtcagtttgggttactgtgtggcatatgttgaacatgaaagatgtgtgtttctcacatcaacttttatgaatctggtcctttttgtagctggctccaaggctgcatctctccactggactagcgagagggttgtcagtgttttgctcctgggtctgcttccggctgcttatttgaatccttgctctgcgatggactattccctggctgcagccctcactcttcatggtcactggcaagtatagcaattccaaatatagttgtctgctcagtttgtttgctgtgagcttgtcttatgtattatatatgagggagaagttgattgaaatgccctaaatttgttgaaaactttaaaatatatataaaatatgtatatgcctagatttatatatctgcctgcctattcaatgtctttcaattcgatttccgtatctaatagcattttgaatgtagcctgtcaaactgaatttctgatctcccctaatctgttcctcctgcactcttgccccatctgaattaatggcatttccagttttctctttgttcaagtctaaacctggtaagctccaaacttggtcattatccttgactctagtagtagtctcctaactggttcccatttgtgttcattcccaacacagcatacccagtgatcctgttaaaatgttaattagaataagacattccccttctcaaaaccctattttgtctcttcatgttactcaaagtcagaattcttagggttgtctgtagactctacatgattgaaccaccctgtttcttccctcatttttagctgctctctctctcattcacactgccttccttgagattccttgaacatgccagggacattccaggtctcagggcttctcttaactgcttctgcctgaaactctttttctagctatacacttggcttgttccttcatctccttcaggtcttgaatgccattctctcaacaaagccttccctaaccacttattcaaaattgcagtttctgtcctgccattccttatctctcttgcttgttttatttttctcaatagtacttactgccttctaatatactacatcatctgttcattattttatatagtaattgcttccttgcattttatcacccaaatgtatatccctaaatagtatagtttattcttgcctcttaaaaaaaaaaaagagatgtatgtgggtggattattttgttatttttactgtatttgtttgctgttgtgcctctagagcctagaactactctctggtacgtgacatatagcactcagtaaatacttgctgaatgaatgagcatccagcgcctgtttgtttgtttgtttgtttgtttattttttgagacagagtctcgctctgttgcccaggctggagtgcaatggtgtgatctcagctcaccacaacctccgcctcccaggtacaagcgattctccctgcctcagcctcccaagtagctgggattacaggcgtgcaccaccacatccggctaatttttttgtatttttagtagagacggggtttcgccattttggccaggctggtctggaactcctgacctcaggtgatctgcccgcttcagcctcctaaagtgctgggattacaggcgtgagccaccatgtccggcccagcttttgtttattttatctggtatagtttgtatgactttctacgtaatgaaccttctaaaatgagggtaaatgacaggttgggttccttgagttgttctttttaagttttgcaagggacaatatgttgtcattgtggggggtagggagccactttcggattgttgaaactggaagtactttggagagtatcttaaccaactcttttattttacagatttggaaactaagacccagggaggttaagtgacttgtcagaatcattttctagctagtgttaaagattttttttttcttttttttttgggacggagtctcactctcacccaggctggagtgcagtggtgtgatcttggttcactgcaacctctgcctcctgggttcaagcaattctcatgcctcagcctcccaagcagctgggattacaggcatgcgccagcacacctggctcagttttgtattttaaatcgagacggggtttcaccatgttgtccaggctggtcttggactcctgacctcaagtgatcctcccaccttggcctcccaaagtgctgggattataggtgtgaaccaccgtgcccagcctaaaggggttttaattatctggttttgtaggactggttaggagaatgagttgttgttgttgatgttgttttttaaccacacagacctttccaaataaaagattccagttgcatatgaaatattagatcacaagtacagtaagtaatatttctctaacatgtcatccctcttgaaggagctgtctataatgtgctccacttcctcaacactgagtctcttttagcctgtattaattggggtcttatcccaactatataacttaggttattcttaccaagggcactgaaggccttcatctttccaaatccggttgtctattttctgccctccacttgcttgaagtctcagccgccttcaactcaattaacaattctccccataagtcacttttctttggctttccagatgcatagaagtctcctctgccagatccttctcctcttgtctgacctcgagatgacaaaatctccagggctgagtcatggccttcttaatttctccatctgtacccttttttaggtgagctcagatctgacctgtttttctgagctgcagacttgtttatctaattgtctaattgacatccacttggatgtctgatagttatcccagatctaacattggccaaatcgctcttttttccccccaaatctcccttgatttctcctttaaaacccccttctcaaagctatgctcaaactaaaattcttaggagtcattctagatatttctttttgttcttaccccacttattccatcagttctgttctttctttaaaaaatagtctgaatcggccaggcgtggtctcacgcctgtaatcctagcactttgggaggccgaggcgggcggatcatgaggtcaggagtttgagaccagcctggccaatatggtgaaaccttgtctctactaataatacaaaaattaagctgggcgtggtggcacacgcctttagtcccagctacttgggagactgaggcagaagaaccgctggaacccaggaggtggaggttgtagtgagccaagatcgtgccactgcactccagcctgggtgacagagtgagactctgtctcaaaaaaacaaaactctgaatcggtcgaggggaaggggagggagagcactaggataaatacctaatgcacgcggagcttaaaccctagatgacgggttgataggtgcagcaaaccaccatggcacatgtatacctgtgtaacaaacctgcacgttcagcacatgtatcccagaacttaaagtacaagaagaaaaaaaaaaaggaaaatggacattattagaaaaaaaaatagtctgaattgtcactttgcaccctgtcaccagcctaggttaagacaacagtctcacgtaggctacttcggttgccttctaactagtttcctcttcagttgttgctctgtcccccacccactctgttcattcatcacactacagccatagtgacctttttaaaacgtaaaattatattcctccaaagtagatatacaaatggccaataagcacatcagaaattgctcagcatcatttgtcattagagaaatgcaaatcaacaccacaatgagatgccacctcacaccccattaggatggctgtaataaaagatgggcagttttaagtgttgctgaggacttggagaaattggaaccctcgtggttctgctgggaatataaaacgtttcaatcactttggaaaacattctggcagttacaacaaaaagttaaccttagagttaccatctgactcggcgatctacttttaggtgtatacccaagagaactgaaaacgtgtccacgcaaaaaacttgtacaggaatgatcatagcagcattatttataatagccaaagagtggaaacaatccaaatggctgtcagtggatgaatagctaaacaaaatatggtgtattcatacaatagaatattattcagccatacaaaggaatgatgtattgataaatgctatgacatggatgaacattgaaaacattatgctaagttgacacaaaggccatatattgtatggcttttttttttttttttttttttttgagacagagttttgctcttgtcgctcaggctggagtgcaatggtgcgatcttggctcggcacgatctcggctcagcacgatctcggcttactgcaacctccgcctttcgggttcaagcgattctcctgcctcagcctcccaagtagctggcattacaggcatgtgccaccacgcctggctaattttgtattttttgtagagatggggtttctccttgttggtcaggctggtcttgaactcccaacatcaggtgatccgcccacttcacccacccaaagtgctgggattacaggtgtgagccaccacgcccagtggtgtatgggttcttttatatgaaatgtctagaacaggcaaagccatagagacagaaagtaaatttgtagttgggtagtgggctaagaggtagagggtttctttttggggtaatgagaatgttctggaattaaatgatgattgcacaactcaatatactaaaaaccagtggattatatactaaaaagcgtgaattttttctggcgtttgacttacattgcaataaaactgttataaaaatagtaaaattaggtcactcctaatctcaggcactccctgcttaaaatgtatcagtggtttcctattatatttcatataaaattcagattccttatcatgaccttcaaagaccctatgcaaccgacccctgccttcctctgatctctgcttcacccatgtgctccagccacacaaaatcttactattcattagagatgccactttggtttggatgttctcattcatgtcttcctttctaaagtgtttcttctcagtaacatatatatttactttttccttctcattcactagtatattccataagggtagggatgctgtctcacttactatactcccaacatttatgacagattctggcacatgatatctacttaataaattctttttgaattaattaaaaatactgtagagttttagttatttttagttattggggcgaaaggatcacttgcagccaagagttcaagaccagcctgggcatcatggtgagaccgcatctttaaagaaataaaaaacaggccaggcgcagtagctcacgcctgtagtcccaacactttgggaggctgaggtgggcggatcacaaggtcaggagttcgagaccagcctggccaatatggtgaaaccctgtctctactaaaaatacaaaaattagctgggtgtggtggtgggcgcctgtagtcccagctacttgggaggctggggcaggagaatcacttgaacccgggaggcggaggttgtagtgagccgagatcgtgccactgcactccagcctgggcaaaagagcgagactctgtctcaataaataaataaataaataaataaatagaaggaaataaaaaacaattagccgggcatggaggcatgctcctatagtcccagctacttgggaggctgaggcaggaggatcacttgagctcaggagttcgaggctgtagtgagctatgatcaggccactgcactccagcgtgggcaacagagtaagactttgtctctaaagaaaagtcactagaaatagacttactgacatacacacgcaaaaggctatacagaatcccctaaagaagcaaacagtgacagtggagtggcaaatggagacattgcatttgaacttgacagattgtttttttgcagccaagttatctgtatagtcttctaatttcactgtggttttttattgatgttatgattttttctttttctttaggggccttggacaagttgttactgactatgttcatggggatgccttgcagaaagctgccaaggcagggcttttggcactttcagctttaacctttgctgggctttgctatttcaactatcacgatgtgggcatctgcaaagctgttgccatgctgtggaagctctgacctttttgacttcatactttgaagaattgatgtatgcctctttgcctctgctttgtcatgccattaagctcacaataaggaagaaataacagataagtccattggtggacagccttcttctcttaatcacaagattattttcagaatttaatctttgaggaaaaggtttgagaggaattatatctaagttgtgagactgagttctatattctggtgagttaatggggttgcctcccagcttcttataagactcacagtataactaaacatgatatatcagcttttgcctttcaatttatcaatctcttaaagagaatccaactttattacgattagtatatgatcaaacttccatatttgccttgggaataatggacaaagggaaatactcttaattcatgaataaaaactttgcagaaaattagacagtgtttaattttcgaaaacttccctctctagacagtagataccacctactgatggttacatatactagggaaattttaaaattaggaaatgctgatagctcatattataaatttctaaatcctaggaagaaacgcttggagtgcttctgaatatacagaagttccatttaagggcaagtttccccgtagatgtatcaaaatactaccaactgtaaattgagatttaattcccaaatgtattctacttgttctaaaacaatctgtccacaaatataaaactataagtaataaattgttattttcgcacaatgggaatctctaatgtgaaaatgtattctatgaaaataatttttttaaataaaatgttatataataaaagtgtcttctatgcttttatatattagctatcagtagttttattcattagaattaggtgtccattgcatccacagcatgaaaacaaaattgggttttttttttttttttgagacggagtcgcactctgtcacccaggttggagtgcagtggcatgatctcggagcactgcaagctccgcctcccaggttcatgtcattctcctgcctcagccccccgagtaactgggattacaggcacccaccaccacgcccagctaatattttgtattttcagtggacatggggtttcaccgtgttagcaaggatggtctcgaactgctgacctcgtgatccacccatcttggcctcccagagtgctgggattacaggcatgagccaccccgcccagccaaaattgagtgtttaaattttcttctggggcttagcagttaggtaaatcagacacaaagtactggaaaacaaaaaggacttgtaataggcagaaaaataccaagtgtataagtaatttggtataaacagagtataaggtttagtatttaggaataagaactatgtccagattatggtgttctgtgaataccagcctttggaattcatattatgttctatgtgtatttagtctggtctaagagttgagtgtaaggcatgatgctgtcttctatcaatatagagtaactgggactaagcacattttactcaccaaggaccttactgggaagctgaggcaaaggaagagtatgtgtttatgaatgtgtactaggggttaaagacatgctctccttgatgtgcctgtggtcttgtagagactcaagtgtgcattagggtttaggaagaggtgattaattctgttttggggtgggtaaaaggtttcaaaagagggtgatgcctgaatagcagtggcacaccaacagatagtggtggtgggaccagtccaccctggtgggagagaatatataaacaatattctgacattgtttagaattgctgatgcttgatgatgataaaaaacaaatggactaaaagtcaattttattgttttaaaattctctatagacgatcccctccccaccttgtagtgtcattccttcccttccctagctctcagtatactgctgctgtagagtggagtgatgaaatggagtcttccataaagtcaaaatggggatggcagtgactctggataatatgggaatccatagctatctctagtaccatcagatcctagatatacaaggctgtctagtgctaataagcttcattagatggtgaacgaagttggagtggaggctggttgggcactgcctgccccatgtccctgctggtttggtcattaggatggagctgagctgtctttgggaagtcagtaggttgctgtgagctgctggaaaatgaggcaagattccggaagggtgctgtggctcatgcctgtaatcccagcactttgggaggctgaggcagtaggattgcttgaggccaggagtttaaaaccagcgtgggcaacatagcaagaccctgtctctacaaaaatacaataaaacaaaaaaaagattagccggcatcactagcagtggcatgtgcctgtagttctagctaacttgggagccgagtgggagaattgtttgagtcccaggagtttgagattacaatgagctatgatcataccaccgcactccagcttaggtgacagagtgaaatcttgtctctttaaaaaaaaaaaaaatccaagggctaacagcaatagtagtttctgacggtaagcaggacatgatcagaactgtgctttagaaataatttgggtaccattaggtgggttaataagctagaggtagaaggacatgtgaggggatagagacagaataaagggcctgaactttgagagtagcagtggaagtaggagtcaatctcaaaaggtattgtagaagtcaaaaacattaattcattcatttgatagatactaagtacctcatgtaatcagcactgtgccaggtactgtggataacgataaaattttacctgcctttgaagggaattcatagtctaattggggcaacagaagaatgactgcaatacggtgtagtaagtgcagtgatggtgaagcacgtcatgcgctgtgatgtaacaaagggtgcagtaaggatttgcctgcaagtttcctggaagagaagatttgtaacctgggttttgaaagataaggagctgacagtggctggggaagctgggatgaggtgtagggttgactggaggatggcagatcaagcaaaagatgatatgtagtttggtatgacccagcacagggagggactgattgtagaggaccttatatgccacgataagtaattgaaactttatcttttttttttttttttgagacagagtctgactctgtggcccaggctggaatgtagtggcgcgatcttggctcactgcaacctctgcctcccatactcaagacatcctcccacctcagcctcttgagtagctgggactacaggcacatgccaccatccctggctaatttttgtattttttgtagagatggggtcttgctctgttgcccaggctggtctcaaactcctggcctcaagtgattcacccacctccgcctcccaaagggctgggatttcaggcgtgagccactgtgcctggcctgcgactttatcttgacagcaatatggagttactgaagacttaattatgcaaacggcatgatccaatttttattttaaataggttttgctgacagctatgtaaagaatggatttgtgggaggtaagcatggaaacagattattttagtgacccagaaaagaaataatgaattgtgaaggcaattgtagctagaatgaaggagagaacaaatttaagaaatatttagaacttagaatcaatgagagttatactaagatgtgaacgcttgagggaggaaggagctttgctcaattttttgttgtaaataggtggatgggaggtagtgtcattaaagaaaaatgttgaaggaaaattagatatggtactggaatcagtaactactgaagttttggatttgtgagacggctaggaagagatagaatttgtagacttctattttttggcaatatggcagactcaattttagaaagtatttactttgatatgaagcctgttagaatgttaaacaagaacacctttaaaaatatttcatttatttatttgggacggagtttcactcttgttgcccaggctggagtgcaatggcatgatctcggctcactgcaacctccgcttcctgggttcaagcggttctcctgcctcaacctcctgagtagctgggattacaggtgcccacaagcacacctggctaatttttgtatttttagtagagatggggtttcagctatgttggccaggctggtctcaaaactcctgacctcaggtgatccacccacctcggcctcccaaagtgctgggattacagaccactgcacccggccaaaacatattatttagtttgcaaaaagaaatcttctggagccagaccaaagtaagtctgcagctagggaggtaagcaagtgcttagggtatcagttgcccctaagagtatctactaagcccaggtggcccagagttctagtcttcttcttcttattattattattatatatatatttttgagacagagtctcgctctgtcacccaggctggagtgcagtggtgcgatcttggctcactgcaagctccgcctgccaggttcacaccattctcccacctcagcctctggagtagctgggactacaggcgcctgccaccatgcccggctaattttgttttcatatttttagtagagacggggtttcaccgtgtcagccaggatggtcttgatctcctgacctcatgatccgcctgcctcggcctcccaaagtgctaggattacaggcatgagccaccacgcctagccattattatatttttttgagtcagaatcacgctctgttgtccaggttggagtgcagtggcgtgatc

SEQ ID NO: 13081 - protein, 159 aa, Homo sapiens
  ref <308>: DATABASE ACCESSION NUMBER: SWISS-Prot / BAA81889
  ref <309>: DATABASE ENTRY DATE: 2002-06-15
MAVLWRLSAVCGALGGRALLLRTPVVRPAHISAFLQDRPIPEWCGVQHIHLSPSHHSGSKAASLHWTSERVVSVLLLGLLPAAYLNPCSAMDYSLAAALTLHGHWGLGQVVTDYVHGDALQKAAKAGLLALSALTFAGLCYFNYHDVGICKAVAMLWKL

SEQ ID NO: 13082 - DNA, 681 bp, Rattus norvegicus; identical to SEQ ID NO: 4274
  ref <308>: DATABASE ACCESSION NUMBER: EMBL / AA799479
  ref <309>: DATABASE ENTRY DATE: 2000-03-03

SEQ ID NO: 13083 - DNA, 681 bp, Rattus norvegicus; identical to SEQ ID NO: 4274
  ref <308>: DATABASE ACCESSION NUMBER: EMBL / AA799479
  ref <309>: DATABASE ENTRY DATE: 2000-03-03

SEQ ID NO: 13084 - DNA, 709 bp, Rattus norvegicus
  ref <308>: DATABASE ACCESSION NUMBER: EMBL / AA799508
  ref <309>: DATABASE ENTRY DATE: 2000-03-03
gacttagtgcatcagagtacaggtgtcctacaatggctgcctgagcagcatcttagagcagcattacagggatccttcccgaccgcaccatagttataaaccagggacatgacgacgtacacaacccacacacggcagcagtggggatttacacagtgtaacataacattgggggttagcagggacagctgcatgcagggagggtgggtgctgtggggagccaggtcgagaggtggctgtgttggcttccgtccgtgacagaggcagctctcactgagattctcagacacgagtgagtgagtgaccggggatggtctgagtgtcacagtgggctccatgcaggtagcaggaagcagaggcttgctttagttggaagtggctgtatgtctgtcacaagcatgggtctcttcctggtgctgttgccctcagagctgacatgtatggtactggcatgaaatggggaaacccaacagctgtcagaacacccttacaaagacgtggtgtgcactgacaagtagtgtgaacacgtaaaggcgatgcactggccttacctccacggaaactgacggaaggcacatgcaactgagcagctggacaaaaagtcaacagggaaaaaactcatttctagaactggcaacacccgacaggttgatgcccgacagggactggatgtcaaaaaagggactccaacgcaggaaggcgggaagca

SEQ ID NO: 13085 - protein, 142 aa, Rattus norvegicus [sequence omitted]

SEQ ID NO: 13086 - DNA, 2155 bp, Homo sapiens
  ref <308>: DATABASE ACCESSION NUMBER: Refseq / NM_022818
  ref <309>: DATABASE ENTRY DATE: 2002-11-05
attcgccgccgcagcagccgccgcccccgggagccgccgggaccctcgcgtcgtcgccgccgccgccgcccagatccccgcaccatgccgtcggagaagaccttcaagcagcgccgcaccttcgaacaaagagtagaagatgtccgacttattcgagagcagcatccaaccaaaatcccggtgataatagaacgatacaagggtgagaagcagcttcctgttctggataaaacaaagttccttgtacctgaccatgtcaacatgagtgagctcatcaagataattagaaggcgcttacagctcaatgctaatcaggccttcttcctgttggtgaacggacacagcatggtcagcgtctccacaccaatctcagaggtgtatgagagtgagaaagatgaagatggattcctgtacatggtctatgcctcccaggagacgttcgggatgaaattgtcagtgtaaaaccagaaaaaatgcatctcttctagaattgtttaaacccttaccaaggaaaaaaaaggggtgttaccaactgagatcgatcagttcatccaatcacagatcatgaaacagtagtgttcccacctaggagtgttaggaagttgtgtttgtgtttcaagcagaaaaactgagctccaagtgagcacattcagctttggaaactatattatttaatgtaggctagcttgttttcaaattttaaaagtttaaaaataaaatactttgcattctaagttgccaataaaatagaccttcaagttattttaatgctcttttctcactaataggaacttgtaattccagcagtaatttaaaggctttcagagagaccctgagtcttctcttcaggttcacagaacccgccgcctttttgggtagaagttttctactcagctagagagatctccctaagaggatctttaggcctgagttgtgaagcgcaacccccgcaaaacgcatttgccatcacagttggcacaaacgcagggtaaacgggctgtgtgagaaaacggccctgactgtaaactgctgaaggtccctgactcctaagagaaccacacccaaagtcctcactcttgcaggggtagacatttctggtttggtttgttctctagatagttacacacataaagacaccactcaaaaggaaacttgaataatttataattttgatcgagtttcttaaaagaccctggagaaagagtggcatttcttctgtttcaggttttgtctgagttcaaactagtgcctgtgttgttacggaaagcagcagtgtaccagtgtcactctggagtacagcgggagaaacacaaaatagtataactgaaaacattaacattcagacacactcccttctgccttccggcttaaagctgtggatgatccacgtttttgtttttttaatgttaaatgtgtaactcagtattactgaaaaggtacccacattttgaatagtagttatcactcttaggtcagacagccatcagaattctcccacaccaagtgcatgtcagttgtggagaaaacatagcaaaaagagccgtacgctctttacagatactaatgtcaagagttaaacctcctcaggttcaacctgtgataaaagactagtgcttcccagtacttgcatggggttcactatttatagttttcttgggagtatcacaggaaaatcacaattacaccactttagaccctatgtgtagcaggtcacaacttacccttgtgtgtttagatgtgtatgaaatacctgtatacgttagtgaaagctgtttactgtaacggggaaaaccagattctttgcatctgggccctctactgattgttaaaggagttcctgtcacctgctccccccacccccgcatgcgtctgtccacttggctaacttttaatatgtgtatttttacattatgtatattcttaactggactgtctcgtttagactgtatacatcatatctgacattattgtaactaccgtgtgatcagtaagattcctgtaagaaatactgctttttaagaaaaaaaataacatgctgaggggtgacctatatcccatgtgagtggtcactttatttataggatctttaaaacatttttaatgaactaagttgaataaaggcacaattaaaaactgtcaaaaaaaaaaaaaaaaa

SEQ ID NO: 13087 - protein, 125 aa, Homo sapiens; identical to SEQ ID NO: 7991
  ref <308>: DATABASE ACCESSION NUMBER: Refseq / NP_073729
  ref <309>: DATABASE ENTRY DATE: 2002-11-05

SEQ ID NO: 13088 - DNA, 626 bp, Rattus norvegicus
  ref <308>: DATABASE ACCESSION NUMBER: EMBL / AA799526
  ref <309>: DATABASE ENTRY DATE: 2000-03-03
aaacacaaaaccaaattttatttagcttaacagtttctccaatacaaagagaaatattaaaacccaggacatatgcacatataaccccccgccccacccccaaagcccaaaaacctaagagaagacaggacaaagttctcttcaatggagagcactatcttcgcttctggaaaatgtttccacgccccattccacgtcctcttcctcttgcagccacttgggccttcaggatagcagcttttcctcggccagcccctgagccttggtttttatttttcatgctctttaacatgggtgcatttttcagcatgtcaggcaaaatcagaaaccggatcttgctgccacgtatgtacacctgttccagctgtgccactcggccgtctctgtatgtgactgtgatgttggacatctggcagttcatgttgtcctctgcctcaatgagcttcccccgatacacttcaccagtgttggtctcacatgtcactatgtggccttccgcttcgtgcaggactttaattggcacaccgatagacatcttggcaggactcttccagctaactgcaggcgtgtttttttgtttcggtcccgggacaaacgttagaaggcgaaagcttgaagcgatggaa

SEQ ID NO: 13089 - protein, 126 aa, Rattus norvegicus
  ref <308>: DATABASE ACCESSION NUMBER: SWISS-Prot / AAH11510
  ref <309>: DATABASE ENTRY DATE: 2003-02-01
MSIGVPIKVLHEAEGHIVTCETNTGEVYRGKLIEAEDNMNCQMSNITVTYRDGRVAQLEQVYIRGRKIRFLILPDMLKNAPMLKSMKNKNQGSGAGRGKAAILKAQVAARGRGRGMGRGNIFQKRR

SEQ ID NO: 13090 - DNA, 633 bp, Rattus norvegicus
  misc_feature (1)..(633): n=a, c, g or t
  ref <308>: DATABASE ACCESSION NUMBER: EMBL / AA799545
  ref <309>: DATABASE ENTRY DATE: 2000-03-03
caaatgacttagatttaatcactggaagcaaactgaatggaagcttacaacagaagagatacacgtcagtgctttttgcaaaccgagatgggacagactgggggctgcccctcaacctgatcctttgcaaacaaagatgtccacagtgttcctggaactctggctcaggaaaggggagactgctggttctgtggttcagtcaccttgcttagcactcactcctggccagcatctggagcaccggtttgccggttctggtcatcacccttcttcttgtggccagagacaatgtcatcaatccgcagaagcagaactgcagtctccactgctgttttgtatgtttgtagcttcacagccaatggctcccaaatacccagctctttcatgtccactaaggtaccagtctcaccattcacaccccaggtctcacaattctcctgtgtgtgcttggcccgaagggaggtaagcagacgaatggtactggccccacagttctggatcaaggtccganggatgacctctaaagcctgngccacagccctatatggccattgttccacaccagtcatgggcttagatttgtctgtcnaagcatgggccacagccatctcagaggctcccacacaagcacan

SEQ ID NO: 13091 - protein, 545 aa, Rattus norvegicus
  ref <308>: DATABASE ACCESSION NUMBER: Refseq / NP_033966
  ref <309>: DATABASE ENTRY DATE: 2002-01-07
MMGHRPVLVLSQNTKRESGRKVQSGNINAAKTIADIIRTCLGPKSMMKMLLDPMGGIVMTNDGNAILREIQVQHPAAKSMIEISRTQDEEVGDGTTSVIILAGEMLSVAEHFLEQQMHPTVVISAYRMALDDMISTLKKISTPVDVNNREMMLSIINSSITTKVISRWSSLACNIALDAVKTVQFEENGRKEIDIKKYARVEKIPGGIIEDSCVLRGVMINKDVTHPRMRRYIKNPRIVLLDSSLEYKKGESQTDIEITREEDFTRILQMEEEYIHQLCEDIIQLKPDVVITEKGISDLAQHYLMRANVTAIRRVRKTDNNRIARACGARIVSRPEELREDDVGTGAGLLEIKKIGDEYFTFITDCKDPKACTILLRGASKEILSEVERNLQDAMQVCRNVLLDPQLVPGGGASEMAVAHALTEKSKAMTGVEQWPYRAVAQALEVIPRTLIQNCGASTIRLLTSLRAKHTQESCETWGVNGETGTLVDMKELGIWEPLAVKLQTYKTAVETAVLLLRIDDIVSGHKKKGDDQNRQTGAPDAGQE

SEQ ID NO: 13092 - DNA, 1960 bp, Homo sapiens
  ref <308>: DATABASE ACCESSION NUMBER: EMBL / BC006501
  ref <309>: DATABASE ENTRY DATE: 2001-07-13
ggcacgaggctctctccagaaggttctgccggttcccccagctctgggtacccggctctgcatcgcgtcgccatgatgggccatcgtccagtgctcgtgctcagccagaacacaaagcgtgaatccggaagaaaagttcaatctggaaacatcaatgctgccaagactattgcagatatcatccgaacatgtttgggacccaagtccatgatgaagatgcttttggacccaatgggaggcattgtgatgaccaatgatggcaatgccattcttcgagagattcaagtccagcatccagcggccaagtccatgatcgaaattagccggacccaggatgaagaggttggagatgggaccacatcagtaattattcttgcaggggaaatgctgtctgtagctgagcacttcctggagcagcagatgcacccaacagtggtgatcagtgcttaccgcaaggcattggatgatatgatcagcaccctaaagaaaataagtatcccagtcgacatcagtgacagtgatatgatgctgaacatcatcaacagctctattactaccaaagccatcagtcggtggtcatctttggcttgcaacattgccctggatgctgtcaagatggtacagtttgaggagaatggtcggaaagagattgacataaaaaaatatgcaagagtggaaaagatacctggaggcatcattgaagactcctgtgtcttgcgtggagtcatgattaacaaggatgtgacccatccacgtatgcggcgctatatcaagaaccctcgcattgtgctgctggattcttctctggaatacaagaaaggagaaagccagactgacattgagattacacgagaggaggacttcacccgaattctccagatggaggaagagtacatccagcagctctgtgaggacattatccaactgaagcccgatgtggtcatcactgaaaagggcatctcagatttagctcagcactaccttatgcgggccaatatcacagccatccgcagagtccggaagacagacaataatcgcattgctagagcctgtggggcccggatagtcagccgaccagaggaactgagagaagatgatgttggaacaggagcaggcctgttggaaatcaagaaaattggagatgaatactttactttcatcactgactgcaaagaccccaaggcctgcaccattctcctccggggggctagcaaagagattctctcggaagtagaacgcaacctccaggatgccatgcaagtgtgtcgcaatgttctcctggaccctcagctggtgccagggggtggggcctccgagatggctgtggcccatgccttgacagaaaaatccaaggccatgactggtgtggaacaatggccatacagggctgttgcccaggccctagaggtcattcctcgtaccctgatccagaactgtggggccagcaccatccgtctacttacctcccttcgggccaagcacacccaggagaactgtgagacctggggtgtaaatggtgagacgggtactttggtggacatgaaggaactgggcatatgggagccattggctgtgaagctgcagacttataagacagcagtggagacggcagttctgctactgcgaattgatgacatcgtttcaggccacaaaaagaaaggcgatgaccagagccggcaaggcggggctcctgatgctggccaggagtgagtgctaggcaaggctacttcaatgcacagaaccagcagagtctccccttttcctgagccagagtgccaggaacactgtggacgtctttgttcagaagggatcaggttggggggcagcccccagtccctttctgtcccagctcagttttccaaaagacactgacatgtaattcttctctattgtaaggtttccatttagtttgcttccgatgattaaatctaagtcatttgaaaaaaaaaaaaaaaaaaaa

SEQ ID NO: 13093 - protein, 544 aa, Homo sapiens
  ref <308>: DATABASE ACCESSION NUMBER: SWISS-Prot / AAH06501
  ref <309>: DATABASE ENTRY DATE: 2002-06-15
MGHRPVLVLSQNTKRESGRKVQSGNINAAKTIADIIRTCLGPKSMMKMLLDPMGGIVMTNDGNAILREIQVQHPAAKSMIEISRTQDEEVGDGTTSVIILAGEMLSVAEHFLEQQMHPTVVISAYRKALDDMISTLKKISIPVDISDSDMMLNIINSSITTKAISRWSSLACNIALDAVKMVQFEENGRKEIDIKKYARVEKIPGGIIEDSCVLRGVMINKDVTHPRMRRYIKNPRIVLLDSSLEYKKGESQTDIEITREEDFTRILQMEEEYIQQLCEDIIQLKPDVVITEKGISDLAQHYLMRANITAIRRVRKTDNNRIARACGARIVSRPEELREDDVGTGAGLLEIKKIGDEYFTFITDCKDPKACTILLRGASKEILSEVERNLQDAMQVCRNVLLDPQLVPGGGASEMAVAHALTEKSKAMTGVEQWPYRAVAQALEVIPRTLIQNCGASTIRLLTSLRAKHTQENCETWGVNGETGTLVDMKELGIWEPLAVKLQTYKTAVETAVLLLRIDDIVSGHKKKGDDQSRQGGAPDAGQE

SEQ ID NO: 13094 - DNA, 616 bp, Rattus norvegicus; identical to SEQ ID NO: 4323
  ref <308>: DATABASE ACCESSION NUMBER: EMBL / AA799551
  ref <309>: DATABASE ENTRY DATE: 2000-03-03

SEQ ID NO: 13095 - protein, 201 aa, Rattus norvegicus; identical to SEQ ID NO: 4324
  ref <308>: DATABASE ACCESSION NUMBER: PIR / S06147
  ref <309>: DATABASE ENTRY DATE: 2001-02-02

SEQ ID NO: 13096 - DNA, 3822 bp, Homo sapiens
  ref <308>: DATABASE ACCESSION NUMBER: EMBL / AB023061
  ref <309>: DATABASE ENTRY DATE: 1999-03-05
ctgccagccccgcccagactccaggcaggttctcgttgctatggtgatcgccggtgcaagctggatgcttggacgcgccgctgccagtccaacgcagaccccgcccacgacgtcgacgattcgtgtagcccgcaggtcccgcgtggctctcgttgccatggtgatcgccgccgctggctcaggcggaccaggccgcgcggagccccagctttcacagccatcgctggactgtggaagaatgaggtcctccctgacacctttggggccccctgtgagccgcgaccgtgtcatcgccagcttccctaagtggtacacgccggaagcctgtttgcagctcagggagcacttccacgggcaggtcagcgctgcctgccaacgcaggaacacggggactgtcgggctcaaactctccaaggtggtggtggttggcgatctctacgtggggaagaccagcctcatccacaggttttgcaagaatgtttttgatcgagactacaaggccaccattggggtggactttgaaattgagcgctttgagattgctgggattccctatagcctccagatctgggacacagctgggcaggagaagttcaagtgcatcgcatctgcctactaccggggtgcccaggtgatcatcacggcctttgacctcactgacgtgcagaccctggagcataccaggcagtggttggaggatgctctgagggagaacgaggcaggctcctgcttcatcttcctcgtgggaaccaagaaggaccttctgtcaggggccgcatgtgagcaggccgaagcagacgctgtgcacctggccagggagatgcaggccgagtactggtcagtgtcggccaagactggcgagaacgtgaaggcattcttcagccgcgtagccgccctggcattcgagcagtcggtgctgcaggacctggagaggcagagcagtgcccggctccaggtcggcgatggagacctaatccaaatggaagggagtccgcccgagacccaggagagcaagaggccctccagcctgggctgctgctaactggagcctgcgtggaaggcctccgctccctgcacacacacggacaggaatttccgtgactgtggtgcggagactggagcccaagctctgcagcgtgtcgccctcaagctgtaggcccgtgttccagtccctccacccacccaccgggctcagctccagggcacagtcacttgtccgttgcaggttgggcactagaaaaggccccactggctgcctgggagccccacaccaccgggccagtgcaggcactgtggtgatcccataaaaggccagtccatttgcagggtcatcagacagtcacctttggcctcaagaggcctcagaactgcaaactcctgcgtcggtctatactactcggccatggcccacatcagcagtcaaccctgcactctttcccagcgatcttggatgtgtccccaggatccgtcacagtgttccaggcaacctggacttgtcaaagtcagcacctgaaggagaggccacctgccattccccctgggagttttctgttgtcagcaggacttatggttctgggtctcagagcttcaggcctcactgtccttctgccacggacgctcaaggttcctgggcagaccagcacctctggaggacaatggacaaaatgtctcttagacctgttctggctgaagggctatctctggcacctctgagatccctaggtcctgccctcctggtccgtgggccaggatgtgcagaacaaccactcaggcctttctggcccacctggacagtgcatttacctgtgtgctgcgggaggcagactgcacagctgtcctagggtaactcactctgcagcccttgaacatggcactgccctcctctggcactcatgctgggcctgtgcccactgctgcctctccatccctctctcattggcctatacacctcttaggacctttgtaatggtgtccatgcacctttagaggacttcagaggccctgccaagtctagcatgttcctgtctccaacaccgcctcctgcacatgcagagcagacagaaataccccacacattccccagcctctctgcccagtatgctcatccacagggttttctcactgctatgaaccagccccacagccccaggctcctgtcacctggctatgcccactcatcccacccgtctcgtgctgttgcttcccatagatggcgagcaccttgcaggcagccttctgatcagtactgttctcctagggcctggcacactgcagctgccctgtaaatgttcagctcagcgattgccaaataccagttagggaagaacactggcatctttttctattcattcccccttcaacatattttttgtacttttttatataaatgactttttttttttttttgagatggagtttcacccttgttgcccaggctggagtgcaatggcgtaatctcggctcagtgcaacctctgcctcccaggttgaagcgattctcctgcctcagcctcccaagtagctgggattacaggcatgcaccaccatgcctggctaattttgtatttttagtagagatggggtttctccatgttggtcaggctgctctcagactcctgatctcaggtgacctgcccacctcggcctcccaaagtgctgggattacaagggtgagccaccatgcccggccgtaaatgattttattcatttttatgttttcttttgggcggcgggatggagtctctgtcacccaggctggagtgcaatggcacgatcttggctcactgcaagcttccccttccgggttcatgccattctcctgcctcagcctcccgagtagctgggactacaggcacgtgtgaccatgccaggctaattttttatatttttagtagagagaggtttcaccatgttagccaggatggtctcgatgatctgacctcgtgatctgcccgcctcggcctcccaaagtgctgggattacaggcctgagccaccgcgtccggcctccataaatgacttttaaaggggttgtatgtttagtgtgaacaaagacagtacaaagcatataaaatacaaggtgaaagccccccccccaccacattagctgcgcccctgaagtgtctccagcagaagagatggatgaatggaaggacacacagatggacagagagcaggaaagactgttagctctgctaacagtcaggactattccttctggactctgcgcctttgcctgcacagccagtgttgatggcttgtttgttgttttcaccagagtgagctccttctggacatactgcctggcagcctgccttcctagggagctggcgccaaggcctctccctgatggcacacaaggagcctccttcctgtagcagcgcccagttttcatgtggatggattgtagttcatttgaccctccccagccgcgggccatccggcttgtgtccagcttttagctcttgccaatggtgctgcagtggccattcttgtagttatagctttgcgtactcaggaaggcccttctcccgactgcggcccccagcctggtccactaaatgcagcctgtggtcgggcagacagcattggggtccattaggaagaccaggtttgctgggcataagcttcacaggacgggagaacctgcccatggtggactgtcgttctccacagctcccttcccttgccccttcgggcctccaggatatgtttgcgggggtgggtgtggtgtccagctgttaccagcttctgagctagagctgtactgcctcacgtacacccccacctctgtaaatggtccttgattaaatcgtcctcatatt

SEQ ID NO: 13097 - protein, 333 aa, Homo sapiens
  ref <308>: DATABASE ACCESSION NUMBER: SWISS-Prot / O95755
  ref <309>: DATABASE ENTRY DATE: 2001-10-16
MVIAGASWMLGRAAASPTQTPPTTSTIRVARRSRVALVAMVIAAAGSGGPGRAEPQLSQPSLDCGRMRSSLTPLGPPVSRDRVIASFPKWYTPEACLQLREHFHGQVSAACQRRNTGTVGLKLSKVVVVGDLYVGKTSLIHRFCKNVFDRDYKATIGVDFEIERFEIAGIPYSLQIWDTAGQEKFKCIASAYYRGAQVIITAFDLTDVQTLEHTRQWLEDALRENEAGSCFIFLVGTKKDLLSGAACEQAEADAVHLAREMQAEYWSVSAKTGENVKAFFSRVAALAFEQSVLQDLERQSSARLQVGDGDLIQMEGSPPETQESKRPSSLGCC

SEQ ID NO: 13098 - DNA, 588 bp, Rattus norvegicus; identical to SEQ ID NO: 4354
  misc_feature (1)..(588): n=a, c, g or t
  ref <308>: DATABASE ACCESSION NUMBER: EMBL / AA799575
  ref <309>: DATABASE ENTRY DATE: 2000-03-03

SEQ ID NO: 13099 - protein, 976 aa, Rattus norvegicus; identical to SEQ ID NO: 2372
  ref <308>: DATABASE ACCESSION NUMBER: SWISS-Prot / CAA42210
  ref <309>: DATABASE ENTRY DATE: 2002-06-15

SEQ ID NO: 13100 - DNA, 3744 bp, Homo sapiens; identical to SEQ ID NO: 2373

SEQ ID NO: 13101 - protein, 974 aa, Homo sapiens; identical to SEQ ID NO: 2374

SEQ ID NO: 13102 - DNA, 588 bp, Rattus norvegicus; identical to SEQ ID NO: 4354
  misc_feature (1)..(588): n=a, c, g or t
  ref <308>: DATABASE ACCESSION NUMBER: EMBL / AA799575
  ref <309>: DATABASE ENTRY DATE: 2000-03-03

SEQ ID NO: 13103 - protein, 976 aa, Rattus norvegicus; identical to SEQ ID NO: 2372
  ref <308>: DATABASE ACCESSION NUMBER: SWISS-Prot / CAA42210
  ref <309>: DATABASE ENTRY DATE: 2002-06-15

SEQ ID NO: 13104 - DNA, 3744 bp, Homo sapiens; identical to SEQ ID NO: 2373

SEQ ID NO: 13105 - protein, 974 aa, Homo sapiens; identical to SEQ ID NO: 2374

SEQ ID NO: 13106 - DNA, 602 bp, Rattus norvegicus
  ref <308>: DATABASE ACCESSION NUMBER: EMBL / AA799580
  ref <309>: DATABASE ENTRY DATE: 2000-03-03
gagcatatgcggatttattttggcacagacttggcatcctgaaccctaacccttcaacccatatcccctaaaacagctctgatagctctgacagtgacaagcttgttctcgggcctggaccgcacccagagtggagagcaatgacctcagaaccaaggccgagggcctgtcatccccttactccctagaatccaggaaaacccaaccagaggcagagccctgcctacgctggcaggtacaagagcatccgcaggctcctgtcagtagaaaagcaattccaaccagaccaccaggccccagcagagctaggagcagccagtgtgactctagaggagaaggtgcccgtggactgagaagaaaaggaagctgacccccaatatgtaggttcaacgttgccctgggaggatacctggcttccatgctcaagtccgagaggtccaaagtcagaggacaaatagcttcctccagctcagcgtggatcccgtcgcctcttcttccctaaactcaaggggcctgcgactgttcctttcacccccggggaaggggagcacttgtcctgagctgccatgcataccagaaagctgagggcgggataaaagttg

SEQ ID NO: 13107 - DNA, 591 bp, Rattus norvegicus
  ref <308>: DATABASE ACCESSION NUMBER: EMBL / AA799636
  ref <309>: DATABASE ENTRY DATE: 2000-03-03
ccacatgaaaatgaaattacaattataagcatgaactaggaaacaaactgtaagcatgaactaaaaattacaaggtaacttgctacataaccatgataagacaacgattacataccccgtaagttctagattttacaattccaacacaatgttggtactttatatatagacaaatggcatatttaaaagtctttcttctctttctctttcgtgcatctacaagtactgtgtgcatgtgcacaccaaagccacaatgtacattgagaaggtcagaggaaaatttacagattattggttctttccttttaccatgcaggtcccagggatagaactcaggtcatcaaactccaacaagcaccattagctgccaagtcatcttacccacacggatgttggaatcttaaaaatattttttcacatttttcagttgattttcaaaataaaaaaagtttagtatacaattacaggcactgactttttaaatagagattcacagtaactttaagatacatttacacggaaatatatagacaaaatagtttgctgagtcaaaaaggacttttcccccaaaattaataaaattgagattga

SEQ ID NO: 13108 - DNA, 571 bp, Rattus norvegicus; identical to SEQ ID NO: 4377
  ref <308>: DATABASE ACCESSION NUMBER: EMBL / AA799637
  ref <309>: DATABASE ENTRY DATE: 2000-03-03

SEQ ID NO: 13109 - protein, 457 aa, Rattus norvegicus; identical to SEQ ID NO: 4378
  ref <308>: DATABASE ACCESSION NUMBER: SWISS-Prot / AAD13197
  ref <309>: DATABASE ENTRY DATE: 2003-02-01

SEQ ID NO: 13110 - DNA, 1236 bp, Homo sapiens; identical to SEQ ID NO: 4379
  ref <308>: DATABASE ACCESSION NUMBER: EMBL / U09284
  ref <309>: DATABASE ENTRY DATE: 2001-03-23

SEQ ID NO: 13111 - protein, 326 aa, Homo sapiens
  misc_feature (1)..(326): Xaa=Unknown amino acid
MANALASATCERCKGGFAPAEKIVNSNGELYHEQCFVCAQCFQQFPEGLFYEFEGRKYCEHDFQMLFAPCCHQCGEFIIGRVIKAMNNSWHPECFRCDLCQEVLADIGFVKNAGRHLCRPCHNREKARGLGKYICQKCHAIIDEQPLIFKNDPYHPDHFNCANCGKELTADARELKGELYCLPCHDKMGVPICGACRRPIEGRVVNAMGKQWHVEHFVCAKCEKPFLGHRHYERKGLAYCETHYNQLFGDVCFHCNRVIEGDVVSALNKAWCVNCFACSTCNTKLTLKNKFVEFDMKPVCKKCYEKFPLELKKRLKKLAETLGRKX

SEQ ID NO: 13112 - DNA, 571 bp, Rattus norvegicus; identical to SEQ ID NO: 4377
  ref <308>: DATABASE ACCESSION NUMBER: EMBL / AA799637
  ref <309>: DATABASE ENTRY DATE: 2000-03-03

SEQ ID NO: 13113 - protein, 457 aa, Rattus norvegicus; identical to SEQ ID NO: 4378
  ref <308>: DATABASE ACCESSION NUMBER: SWISS-Prot / AAD13197
  ref <309>: DATABASE ENTRY DATE: 2003-02-01

SEQ ID NO: 13114 - DNA, 1236 bp, Homo sapiens; identical to SEQ ID NO: 4379
  ref <308>: DATABASE ACCESSION NUMBER: EMBL / U09284
  ref <309>: DATABASE ENTRY DATE: 2001-03-23

SEQ ID NO: 13115 - protein, 326 aa, Homo sapiens; identical to SEQ ID NO: 13111
  misc_feature (1)..(326): Xaa=Unknown amino acid

SEQ ID NO: 13116 - DNA, 641 bp, Rattus norvegicus; identical to SEQ ID NO: 4401
  ref <308>: DATABASE ACCESSION NUMBER: EMBL / AA799650
  ref <309>: DATABASE ENTRY DATE: 2000-03-03

SEQ ID NO: 13117 - protein, 257 aa, Rattus norvegicus; identical to SEQ ID NO: 4402
  ref <308>: DATABASE ACCESSION NUMBER: Refseq / NP_071985
  ref <309>: DATABASE ENTRY DATE: 2002-11-05

SEQ ID NO: 13118 - DNA, 1542 bp, Homo sapiens; identical to SEQ ID NO: 4403
  ref <308>: DATABASE ACCESSION NUMBER: Refseq / NM_006793
  ref <309>: DATABASE ENTRY DATE: 2000-11-02

SEQ ID NO: 13119 - protein, 256 aa, Homo sapiens; identical to SEQ ID NO: 4404
  ref <308>: DATABASE ACCESSION NUMBER: Refseq / NP_006784
  ref <309>: DATABASE ENTRY DATE: 2000-11-02

SEQ ID NO: 13120 - DNA, 640 bp, Rattus norvegicus; identical to SEQ ID NO: 4457
  ref <308>: DATABASE ACCESSION NUMBER: EMBL / AA799724
  ref <309>: DATABASE ENTRY DATE: 2000-03-03

SEQ ID NO: 13121 - protein, 133 aa, Rattus norvegicus; identical to SEQ ID NO: 4458
  ref <308>: DATABASE ACCESSION NUMBER: Refseq / NP_033113
  ref <309>: DATABASE ENTRY DATE: 2002-01-07

SEQ ID NO: 13122 - DNA, 726 bp, Homo sapiens; identical to SEQ ID NO: 4459
  ref <308>: DATABASE ACCESSION NUMBER: Refseq / NM_015972
  ref <309>: DATABASE ENTRY DATE: 2002-11-19

SEQ ID NO: 13123 - protein, 133 aa, Homo sapiens; identical to SEQ ID NO: 4460
  ref <308>: DATABASE ACCESSION NUMBER: Refseq / NP_057056
  ref <309>: DATABASE ENTRY DATE: 2002-11-19

SEQ ID NO: 13124 - DNA, 596 bp, Rattus norvegicus
  ref <308>: DATABASE ACCESSION NUMBER: EMBL / AA799801
  ref <309>: DATABASE ENTRY DATE: 2000-03-03
ccggcgctcgctacagcgctctgctcggctcgggagggaagtattggagcgcgccaagagaagggctgtggactggcattctccagagcgatccagaggctgcgtgggggtcctttacggccaggacccctaccaggaacgatggtcggtcccgggtccccagagcctcctaggagaggcagagagaagaaaggcgcccaacccttagtacttccttcaggacaatggcagaattcatggactatacttcaagtcagtgtgggaaatactacttgtctacaccggaggaaggaggggcaacccacgtctaccgttatcacagaaggaagcctgcagaagtgcacgtgtgctcagactcggggcacagggaagcgcaaagaaactgcagaggagagacatctgttggtccaggaagcatctatcaaacatcagagcattctcaagagtcatcttggcctattgagaacatctctaaggacctctacatagaagtctatccagggacctattctgtcactgtgggctcaggtgccttaagcaagaagacccatgtggttgcagttgactcggggcaaagtgtggacttggtgttcccc

SEQ ID NO: 13125 - protein, 212 aa, Rattus norvegicus
  ref <308>: DATABASE ACCESSION NUMBER: Refseq / NP_065641
  ref <309>: DATABASE ENTRY DATE: 2002-01-07
MEYCLAAAALNGVDRRSLQRSARLGREVLERAKRRAVDWHSPERSRGNVGVLYRQGPYQERWSVPGSQRLLGEREERCPTLSSSFGAMAEFMDYTSSQCGKYYLSMPEEGGATHVYRYHRRKPPEMHMYSDTGHSQEQRNCRGETSVGQESIYQTSEHSQESSWPTENISKDLYIEVYPGTYSVTVGSSALSKKTHVVAVDPGQSVDLVFPV

SEQ ID NO: 13126 - DNA, 1332 bp, Homo sapiens
  ref <308>: DATABASE ACCESSION NUMBER: Refseq / NM_020642
  ref <309>: DATABASE ENTRY DATE: 2002-11-05
ccgggagcgctaggcctggtccctcttcctagaatagcgttgcgcgcatgcgccttgacgagtgagccggggagccatggacaactgtttggcggccgcagcgctgaatggggtggaccgacgttccctgcagcgttcagcaaggctggctctagaagtgctggagagggccaagaggagggcggtggactggcatgccctggagcgtcccaaaggctgcatgggggtccttgcccgggaggcgccccacctagagaaacagccggcagccggcccgcagcgcgttctcccgggagagagagaagagagacccccaacccttagtgcttccttcagaacaatggctgaattcatggactatacttcaagtcagtgtgggaaatattattcatctgtgccagaggaaggaggggcaacccatgtctatcgttatcacagaggcgagtcgaagctgcacatgtgcttggacatagggaatggtcagagaaaagacagaaaaaagacatcccttggtcctggaggcagctatcaaatatcagagcatgctccagaggcatcccagcctgctgagaacatctctaaggacctctacatagaagtatatccagggacctattctgtcactgtgggctcaaatgacttaaccaagaagactcatgtggtagcagttgattctggacaaagcgtggacctggtcttccctgtgtgatgttgaccatcactgccatcacatcacctttttttaagtagtaagaataaagccactgtatgattctcttaatagctatacattaatcctgtttttagtgctgactgggtcagccttccgggaactggagtctgtctctttcagtgcttttttgtttgtttggttggtttttttttgagacagtctcactctgttgcccaggctggagtgcagtggcgtgatctcggctcactgcaagttccgcctcccgggttcacaccattctcctgcctcagcctcccgagtagctggcactacaggcacccgccaccatgcccggctattttttttgtatttttagtagagacggggtttaaccatgttggccaggatggtctcgatctcttgacctcgtgatccacccaccttggcctcccaaagtgttgggattacaggcgtgagccaccgcgcccggcctcagtgccttttttaacttgagggtgtagaggtcctccacgcttgtttgcctgaaagtaatataatgatgctgtctgaacaggttttactgcttgctttccaagtaaaggttaattatgataataaagagatttggaaatgaaaaaaaaaaaaaaaaaaaaaaaaaa

SEQ ID NO: 13127 - protein, 210 aa, Homo sapiens
  ref <308>: DATABASE ACCESSION NUMBER: Refseq / NP_065693
  ref <309>: DATABASE ENTRY DATE: 2002-11-05
MDNCLAAAALNGVDRRSLQRSARLALEVLERAKRRAVDWHALERPKGCMGVLAREAPHLEKQPAAGPQRVLPGEREERPPTLSASFRTMAEFMDYTSSQCGKYYSSVPEEGGATHVYRYHRGESKLHMCLDIGNGQRKDRKKTSLGPGGSYQISEHAPEASQPAENISKDLYIEVYPGTYSVTVGSNDLTKKTHVVAVDSGQSVDLVFPV

SEQ ID NO: 13128 - DNA, 596 bp, Rattus norvegicus; identical to SEQ ID NO: 13124
  ref <308>: DATABASE ACCESSION NUMBER: EMBL / AA799801
  ref <309>: DATABASE ENTRY DATE: 2000-03-03

SEQ ID NO: 13129 - protein, 212 aa, Rattus norvegicus; identical to SEQ ID NO: 13125
  ref <308>: DATABASE ACCESSION NUMBER: Refseq / NP_065641
  ref <309>: DATABASE ENTRY DATE: 2002-01-07

SEQ ID NO: 13130 - DNA, 1332 bp, Homo sapiens; identical to SEQ ID NO: 13126
  ref <308>: DATABASE ACCESSION NUMBER: Refseq / NM_020642
  ref <309>: DATABASE ENTRY DATE: 2002-11-05

SEQ ID NO: 13131 - protein, 210 aa, Homo sapiens; identical to SEQ ID NO: 13127
  ref <308>: DATABASE ACCESSION NUMBER: Refseq / NP_065693
  ref <309>: DATABASE ENTRY DATE: 2002-11-05

SEQ ID NO: 13132 - DNA, 630 bp, Rattus norvegicus
  misc_feature (1)..(630): n=a, c, g or t
  ref <308>: DATABASE ACCESSION NUMBER: EMBL / AA800044
  ref <309>: DATABASE ENTRY DATE: 2000-03-03
aacgtgaaagccgttttaatttggtcggtacacatttaacaaaatatgttagagatacaaggtatttacaatggcaaaacatgtgaaacaaaatcaaactgttttcagacaggaatgctttttgaggcaggatgtcactgtgctgcccaggcggggcccaagtgaacccgctcccacccagctccccagtggccgagtcggagtcggtgagcagtgctgccagaccgcactgctcgtcaacgtcccatgcgaatccggaagactttcagctcccactcactactcgggtctcgagccccaacacaaagtccacaaggcccagcctaggaggtacaaacactagcacatttggcaattaaagatcatctgctgatgggagctggcagggcagtgaagggcaagccccacaaggaagacttcactggaaggaactagagggaagtggtgtccttaatcacgtggccttctcagcctgcagnaaatacanaactgctttaaaagctcacgaggctgtccttacagcagaanaccagcaaccataagggtccaactcttctcagcagcactcccacccttcctaatgcgttgacccttcaaagtgtcctcatacaacggttgacccaaccacaa

SEQ ID NO: 13133 - DNA, 448 bp, Rattus norvegicus
  ref <308>: DATABASE ACCESSION NUMBER: EMBL / AA800148
  ref <309>: DATABASE ENTRY DATE: 2000-03-03
aaattaaaacctcaaactctttactcagaaatggcacgtaagaaatgttcactgaacttgcaggtagggcctcatcagagagagggtcgaggggaagcaggagcagtatgatccgtcattgactcaggagagagaagggcaagaaggtgcagatccatgatagagagctggagggtgggagggacctggctcgctgttggaccgtatcttcctgtgcccagatctgcccagatgtgcttggaaaggggccaagtgtgcagtgagatcaccagctcatctgccttcacagcacaccaggaagccaaggacagcagagccatcgtcttttgcagggggagtggatgcctacatggctgctggggcactagaggtgtcactgcccaggtcaaagctaacggagctcctgaactgcccgtgtccatctctccgccagcctgcccatggactg

SEQ ID NO: 13134 - protein, 445 aa, Rattus norvegicus
  ref <308>: DATABASE ACCESSION NUMBER: SWISS-Prot / AAF22214
  ref <309>: DATABASE ENTRY DATE: 2002-06-15
MSVTYDDSVGVEVSSDSFWEVGNYKRTVKRIDDGHRLCGDLMNCLHERARIEKAYAQQLTEWARRWRQLVEKGPQYGTVEKAWMAVMSEAERVSELHLEVKASLMNEDFEKIKNWQKEAFHKQMMGGFKETKEAEDGFRKAQKPWAKKLKEVDAAKKAHHTACKEEKLAVSREANSKADPSLNPEQLKKLQDKIEKCKQDVLKTKDKYEKALKELDQTTPQYMENMEQVFEQCQQFEEKRLRFFREVLLEVQKHLDLSNVASYKGIYRELEQSIKAADAVEDLRWFRANHGPGMAMNWPQFEEWSADLNRTLSRREKKKAADGVTLTGINQTGDQSGQNKPSSVSSYEKTQNYPADWSDDESNNPFSSTDANGDSNPFDEDTTSGTEVRVRALYDYEGQEHDELSFKAGDELTKIEDEDEQGWCKGRLDSGQVGLYPANYVEAIQ

SEQ ID NO: 13135 - DNA, 437 bp, Rattus norvegicus
  ref <308>: DATABASE ACCESSION NUMBER: EMBL / AA800186
  ref <309>: DATABASE ENTRY DATE: 2000-03-03
ggccaggtttggtggcacctgctttaatttcagaatttgggaggtagaggcaggtggaattctatgagttcaaggccagccagggctgtatacatagtaagaccctgtctcagaaataaaaaaatttttgtgttgtggattacatataatttaagatttattactttttaaaatgtatagttcattggtggtaagtaggtccgtaagttgtgactgtagctacaactttgttttttagtatgtatttatccatgcatacatgaggaagtcagagatcagcttgtaggtgtccatgaatttaaactcaggtcattaggcttaactataggcacatttaccccttgagccttttctctggctcttttatagcttgtaaacctgaaactgtcctcatcaaacactgatgatgtcccacctgtcccgctccccctcgtgcc

SEQ ID NO: 13136 - DNA, 437 bp, Rattus norvegicus; identical to SEQ ID NO: 13135
  ref <308>: DATABASE ACCESSION NUMBER: EMBL / AA800186
  ref <309>: DATABASE ENTRY DATE: 2000-03-03

SEQ ID NO: 13137 - DNA, 543 bp, Rattus norvegicus
  ref <308>: DATABASE ACCESSION NUMBER: EMBL / AA800202
  ref <309>: DATABASE ENTRY DATE: 2000-03-03
gagtgacagtttattggtccttagcattacatcttaatctccaagtgaaattcacagacacaactgcagataaaaacatgtaaaataatataaaaataaattgaaggctacttttatatatttactgaattaagtagtgtaataaatactataagcaaaaagcttcaatcacacaattcagtttcactgaagttatagtagtgtttgtaaatatgaattttagagtttaagttacaaatattaaagcattgaaaaactagtataaaagtgaattttggcacgtaagtgagctcttcattagtatttgacggtgtgggacaatgagaaagccacttcccacctgttttttgaggtacagctatccaactagtcagcagcatggctggaatacttaacagtttacagtctttgaactgaacttttcccttttgagaagccagagcttattactgtgcaaaaattctccaagatcctaacaggattcagagggacgtttttattgatcacagcctgaagggctagtatctaggcctcaggtcagag

SEQ ID NO: 13138 - DNA, 582 bp, Rattus norvegicus
  ref <308>: DATABASE ACCESSION NUMBER: EMBL / AA800210
  ref <309>: DATABASE ENTRY DATE: 2000-03-03
ttaaagaccttcatggcacaacttcttcccagcacagttatgtcttagtcataccaattacaatacaattacaaccaataaatcagggaggggaattctgactttaaacttaaagagaggaagggcacacttcaaagcaaagttaaaaaatactttagagtaactgccaacacagctgttttatattggcatccatcccgccgtctaagcaatacagacacaggaagtgctgagaaatagtgtcccaatacaaggtgtacagatgaggtaatttacaacacagaagttgttactctgtaaaccctgaccctccctaccccaacccattcagatcttttaaactctccacatttctgcagtgactccttatttcttttaagctttgatttattttaaaaggctcttaggtggcactccagagtcctctgcactcaccctcagctcttgcacaggtctgatgtgtgaggaggcccagttacctacagctgtccacaccagtctcagacacacctatacttctgagctgtgaacggggtgtggagtcctgatccacaactttcctttccacctcaaaaggaagaa

SEQ ID NO: 13139 - DNA, 618 bp, Rattus norvegicus
  misc_feature (1)..(618): n=a, c, g or t
  ref <308>: DATABASE ACCESSION NUMBER: EMBL / AA800216
  ref <309>: DATABASE ENTRY DATE: 2000-03-03
agccagcacacaagtgtagagaagtgggtgcccagccaggagcctgatctgcaggtaacgtgggcaaatgaacagtggccacaacattttcattgtttggcagtgccgggccagcaaaccctgttgtgtcctctctggactacagctgagggtttgcacgaggggtgtacagaggctccgctttcgggagttgggatggtcacactgggttgggggttggagaggtaggaggtattaagtgcgtggttctgggcctcagctgtcaactctggggtgggcggagagcagaagtgctacagtcacctggcagaggcacccccccagcacagttgttcagtatcaagcatcaccatggggctcacttgccagatctgtgtgggagaggggcgggggtccagcctgccaggggtgaggggggcatccaagcagccttttagcttttaacattaaggatttgggctgaaaggccatggtgccagttgcgcaacttggcaaaacgagggctgttacgttccgtttcaaacctttcccttgaccttcgcagagcttcctcatcagggtcttgcatgtattctgtcncggtcatctgggccaagattcggaaggaacgagactgca

SEQ ID NO: 13140 - DNA, 593 bp, Rattus norvegicus
  ref <308>: DATABASE ACCESSION NUMBER: EMBL / AA800232
  ref <309>: DATABASE ENTRY DATE: 2000-03-03
agcaaaaagtagactttattacagcagcaactgaggcgattcgaatggccccccggggccacccctgcagcaccacctttctctcccgcccatgcgccccagcgggattgtagaactctgctcccccagtgcccgtgggcctcctgtccacacaggcagggcaggagccagcaggtcagctactagcccccagctagaaggtggctgctgagaaggcccaggcccacgtctgtgcaaaacaagtaaacaaagtgcagaggggaggaagagaggggaagaggcaggatgatactcaaccagggagcccctaaagccctcctgaataatacggggagaaggggcttctcagggtaatactgactggggagagggggcaggaggactgcagcatgcccagggacagccacagcttggctaggggcctggctcaagtgagctctatgaggagacggtgacggcggctgagttgagtgtgctgttcctggcaaagttgaacttgttgagcgtctcctccagcagagaagtcaggcggctctgatcagcctcactaatgaagcccagctgcaccagctcagctgccaagtcggggatgt

SEQ ID NO: 13141 - DNA, 2163 bp, Homo sapiens
  ref <308>: DATABASE ACCESSION NUMBER: Refseq / NM_013392
  ref <309>: DATABASE ENTRY DATE: 2001-06-15
gcggagcgcagctgtgagggagtcgctgtgatccggggccccggaacccgagctggagctgaagcgcaggctgcggggcgcggagtcgggaggcctgagtgttccttccagcatgtcggagggggagtcccagacagtacttagcagtggctcagacccaaaggtagaatcctcatcttcagctcctggcctgacatcagtgtcacctcctgtgacctccacaacctcagctgcttccccagaggaagaagaagaaagtgaagatgagtctgagattttggaagagtcgccctgtgggcgctggcagaagaggcgagaagaggtgaatcaacggaatgtaccaggtattgacagtgcatacctggccatggatacagaggaaggtgtagaggttgtgtggaatgaggtacagttctctgaacgcaagaactacaagctgcaggaggaaaaggttcgtgctgtgtttgataatctgattcaattggagcatcttaacattgttaagtttcacaaatattgggctgacattaaagagaacaaggccagggtcatttttatcacagaatacatgtcatctgggagtctgaagcaatttctgaagaagaccaaaaagaaccacaagacgatgaatgaaaaggcatggaagcgttggtgcacacaaatcctctctgccctaagctacctgcactcctgtgacccccccatcatccatgggaacctgacctgtgacaccatcttcatccagcacaacggactcatcaagattggctctgtggctcctgacactatcaacaatcatgtgaagacttgtcgagaagagcagaagaatctacacttctttgcaccagagtatggagaagtcactaatgtgacaacagcagtggacatctactcctttggcatgtgtgcactggagatggcagtgctggagattcagggcaatggagagtcctcatatgtgccacaggaagccatcagcagtgccatccagcttctagaagacccattacagagggagttcattcaaaagtgcctgcagtctgagcctgctcgcagaccaacagccagagaacttctgttccacccagcattgtttgaagtgccctcgctcaaactccttgcggcccactgcattgtgggacaccaacacatgatcccagagaacgctctagaggagatcaccaaaaacatggatactagtgccgtactggctgaaatccctgcaggaccaggaagagaaccagttcagactttgtactctcagtcaccagctctggaattagataaattccttgaagatgtcaggaatgggatctatcctctgacagcctttgggctgcctcggccccagcagccacagcaggaggaggtgacatcacctgtcgtgcccccctctgtcaagactccgacacctgaaccagctgaggtggagactcgcaaggtggtgctgatgcagtgcaacattgagtcggtggaggagggagtcaaacaccacctgacacttctgctgaagttggaggacaaactgaaccggcacctgagctgtgacctgatgccaaatgagaatatccccgagttggcggctgagctggtgcagctgggcttcattagtgaggctgaccagagccggttgacttctctgctagaagagaccttgaacaagttcaattttgccaggaacagtaccctcaactcagccgctgtcaccgtctcctcttagagctcactcgggccaggccctgatctgcgctgtggctgtccctggacgtgctgcagccctcctgtcccttccccccagtcagtattaccctgtgaagccccttccctcctttattattcaggagggctgggggggctccctggttctgagcatcatcctttcccctcccctctcttcctcccctctgcactttgtttacttgttttgcacagacgtgggcctgggccttctcagcagccgccttctagttgggggctagtcgctgatctgccggctcccgcccagcctgtgtggaaaggaggcccacgggcactaggggagccgaattctacaatcccgctggggcggccggggcgggagagaaaggtggtgctgcagtggtggccctggggggccattcgattcgcctcagttgctgctgtaataaaagtctactttttgct

SEQ ID NO: 13142 - protein, 535 aa, Homo sapiens
  ref <308>: DATABASE ACCESSION NUMBER: Refseq / NP_037524
  ref <309>: DATABASE ENTRY DATE: 2001-06-15
MSEGESQTVLSSGSDPKVESSSSAPGLTSVSPPVTSTTSAASPEEEEESEDESEILEESPCGRWQKRREEVNQRNVPGIDSAYLAMDTEEGVEVVWNEVQFSERKNYKLQEEKVRAVFDNLIQLEHLNIVKFHKYWADIKENKARVIFITEYMSSGSLKQFLKKTKKNHKTMNEKAWKRWCTQILSALSYLHSCDPPIIHGNLTCDTIFIQHNGLIKIGSVAPDTINNHVKTCREEQKNLHFFAPEYGEVTNVTTAVDIYSFGMCALEMAVLEIQGNGESSYVPQEAISSAIQLLEDPLQREFIQKCLQSEPARRPTARELLFHPALFEVPSLKLLAAHCIVGHQHMIPENALEEITKNMDTSAVLAEIPAGPGREPVQTLYSQSPALELDKFLEDVRNGIYPLTAFGLPRPQQPQQEEVTSPVVPPSVKTPTPEPAEVETRKVVLMQCNIESVEEGVKHHLTLLLKLEDKLNRHLSCDLMPNENIPELAAELVQLGFISEADQSRLTSLLEETLNKFNFARNSTLNSAAVTVSS

SEQ ID NO: 13143 - DNA, 601 bp, Rattus norvegicus
  ref <308>: DATABASE ACCESSION NUMBER: EMBL / AA800319
  ref <309>: DATABASE ENTRY DATE: 2000-03-03
acagttcagaatccatatctagagaacactgccacccacggtggaggaattgacacacacattaattagagtcacttagaaaagtctctctcaggcatgcccacaggacgttgagctagaggatcgcacactgagactctctccccgcacaattctagattgtgtcaagaagacagtgaaaggggttggggatttagctcagtggtagagcgcttgcctaggaagcacaaggccctgggttcggtccccagctccgagaaaagaagaaccaagaaagaaaaaaaaaaagaagacagtgaaagctgatcatctcattccccctctagcaaatgcctcagcgcctcctatctgtccaggttatctccaccggcctccgtgttctttggggcggccgtcagtaaggcaccaggaggctctcatagatctgggcaacctctttcagcttctcctccagctcctgagccagggcccgcagtttattgcctgactctgattttgccccatcacataaatccattgagtcactcgcagctttctgtgagtccaggcagaaaatcttcctgtgcctgaggtggaagggaacacagccatccttcccgtg

SEQ ID NO: 13144 - DNA, 452 bp, Rattus norvegicus; identical to SEQ ID NO: 4681
  ref <308>: DATABASE ACCESSION NUMBER: EMBL / AA800678
  ref <309>: DATABASE ENTRY DATE: 2000-03-03

SEQ ID NO: 13145 - DNA, 581 bp, Rattus norvegicus
  ref <308>: DATABASE ACCESSION NUMBER: EMBL / AA800738
  ref <309>: DATABASE ENTRY DATE: 2000-03-03
cctataaaaacaatttatttctgggggcagggagggccagaactttgcaaccagcgcccaccccaccctccagctcctcctttacaaaagaaatttttacagtcaccagtcctgtacagatgctccccacccgccttagtgtacacagctgcctgggtccccctggtccctgtgttcagagcggacctgagccaacaagccagctatccttggagtcggcctagacctgagctcgctttggtactggccactagttggcccctcctaggcctcttcttcttttgggtctgtcctttggcctgtctccctttgcatgactcttcgaagctcgaatgggatacgacaggatgacagccgtgttcagctggctttcgcggtgttgcagtgagagtgtgtgtgtcaccactttcctctcttgctccagtctttgggagtgaagtgcagacacttggagtcaattcgaaggagccgcttgagcatagcccgctcatgccatccacgatgtcttctgacagagtgaggatatactggcccttgtagtaattgatgagattgagatactgcaatgtggaaatgacatc

SEQ ID NO: 13146 - DNA, 475 bp, Rattus norvegicus
  ref <308>: DATABASE ACCESSION NUMBER: EMBL / AA800763
  ref <309>: DATABASE ENTRY DATE: 2000-03-03
acaagttaagacgctttatttactttgggtcatttgctgtgagaactgccttgtttaagagtcagtgtcatctgaaatctttcatagcaattgacttctaaaaatctcaaggcccaaccacatgtcactcagaacactgcattctgcccctcagaatgtagcaccatgtaaacagcactgagttccttctcagcagctctgaccaaagagctacaggggattgacacaaatgaagctctttctttaattgctgcatctgaaaagtctcagatccctttaaacttcttggtgacgcaaacgtcttgtgaatgaacttcatgcaagtaggtaatgtgacttttgtccactatagaaaaggaaacagtgacattcagagaaacatccacagagtccccaaggatatgagaacaggaaatcagaaccatgcccttggcttcattaactccaatacgaaatgcatgagcaccctcgtgcc

SEQ ID NO: 13147 - DNA, 550 bp, Rattus norvegicus
  ref <308>: DATABASE ACCESSION NUMBER: EMBL / AA800800
  ref <309>: DATABASE ENTRY DATE: 2000-03-03
cataactaaaaatttattaaggaaacaaaaccagaattccaaatgggacagaaagaagaaaggttctccccattttccccccagccccaagtcaatggccttcacagccagaggagaggacctcaaaggaagcaacctgggccttacattcatgagaacctgtcttttaagctccgacccctgtgcactgtcctgggctctcctgcacagcacccgtggtgaagcactgctcctcctaaggtgggttgtgtgaccctatcgagattcactcctgctctgcctgagaaggccttctcaatgctcctttacttctgtgctagaacgaaggaatttattcctggtagggagcctccaagtgaggttgtgaacagagaggcagaaaaaaaacccaaaagagccaaaaccctcaaaggctaaagggccctgtgtcccctcttctgtgtagagaagtacagtggcaaagccggaaacaggctcaacaccccaagcacctctgccaatctggaggcttctcaaaagtgaggtgtgagggactgggaaggaaggacaa

SEQ ID NO: 13148 - DNA, 379 bp, Rattus norvegicus; identical to SEQ ID NO: 4749
  ref <308>: DATABASE ACCESSION NUMBER: EMBL / AA800882
  ref <309>: DATABASE ENTRY DATE: 2000-03-03

SEQ ID NO: 13149 - DNA, 416 bp, Rattus norvegicus
  ref <308>: DATABASE ACCESSION NUMBER: EMBL / AA817685
  ref <309>: DATABASE ENTRY DATE: 2000-03-03
tttttttttttttttttgaaagtttaagagtacaaagagtcccatgtttgttctcctagcataggaggaaagggagacagatatattacaattacattctcagggggagggtttctgtcagtggaagtgattaacactggcttcttttctcccctctctggggcagtcttttccttccttggcttcggacagacaggttaatcttctgccatgtagaggcgatacatcagagctaccaccagggctgagatggctgggatcacccagttggtccaccaactagaaagacacatgagcaaagagatgtttgagtgaacctcagtgcagagaccgcaccccctctgatggaaaactaccacagcatattttccttacctctagaacctctttggctaaaaggatggctcagttttgga

SEQ ID NO: 13150 - protein, 134 aa, Rattus norvegicus
  ref <308>: DATABASE ACCESSION NUMBER: Refseq / NP_071581
  ref <309>: DATABASE ENTRY DATE: 2000-12-06
MAEQSDKDVKYYTLEEIQKHKDSKSTWVILHHKVYDLTKFLEEHPGGEEVLREQAGGDATENFEDVGHSTDARELSKTYIIGELHPDDRSKIAKPSETLITTVESNSSWWTNWVIPAISALVVALMYRLYMAED

SEQ ID NO: 13151 - DNA, 515 bp, Rattus norvegicus
  misc_feature (1)..(515): n=a, c, g or t
  ref <308>: DATABASE ACCESSION NUMBER: EMBL / AA818604
  ref <309>: DATABASE ENTRY DATE: 2000-03-03
cggccgccgtgggctcgttgatgatccgcagcacgttcagacccgcgatcacgcccgcgtccttggtggcctgccgctgcgagtcgttgaagtaggcgggcacggtgatcaccgcgttggtcaccgggtggcccaggtacgcctcggcgatctccttcatcttggtcagcaccatggacgagatctcctccgggtagaacgaccggttctcgcccttgtagttcacctgcaccttgggcttgtcgccgtcgttcaccacctggaagggccagtgcttcatgtccgactgcaccaccgggtcgccgaacttgcggccgatcagccgcttcgcgtcgaacacggtgttctgcgggttcagcgccacctggttcttggcggcgtccccgatgagccgctcggtgtctgtgaaggccacgtanctgggggtcgtgcggttgccctggtcgttggcgatgatctccaccttgccgtgctggaacacgcccacgcacgagtaggtggtgcccaagtcgatg

SEQ ID NO: 13152 - protein, 641 aa, Rattus norvegicus; identical to SEQ ID NO: 2952
  ref <308>: DATABASE ACCESSION NUMBER: Refseq / NP_114177
  ref <309>: DATABASE ENTRY DATE: 2002-11-14

SEQ ID NO: 13153 - DNA, 2691 bp, Homo sapiens
  ref <308>: DATABASE ACCESSION NUMBER: EMBL / M11717
  ref <309>: DATABASE ENTRY DATE: 1999-07-02
cgccatggagaccaacacccttcccaccgccactcccccttcctctcagggtccctgtcccctccagtgaatcccagaagactctggagagttctgagcagggggcggcactctggcctctgattggtccaaggaaggctggggggcaggacgggaggcgaaacccctggaatattcccgacctggcagcctcatcgagctcggtgattggctcagaagggaaaaggcgggtctccgtgacgacttataaaagcccaggggcaagcggtccggataacggctagcctgaggagctgctgcgacagtccactacctttttcgagagtgactcccgttgtcccaaggcttcccagagcgaacctgtgcggctgcaggcaccggcgcgtcgagtttccggcgtccggaaggaccgagctcttctcgcggatccagtgttccgtttccagcccccaatctcagagccgagccgacagagagcagggaaccgcatggccaaagccgcggcagtcggcatcgacctgggcaccacctactcctgcgtgggggtgttccaacacggcaaggtggagatcatcgccaacgaccagggcaaccgcaccacccccagctacgtggccttcacggacaccgagcggctcatcggggatgcggccaagaaccaggtggcgctgaacccgcagaacaccgtgtttgacgcgaagcgcctgatcggccgcaagttcggcgacccggtggtgcagtcggacatgaagcactggcctttccaggtgatcaacgacggagacaagcccaaggtgcaggtgagctacaagggggagaccaaggcattctaccccgaggagatctcgtccatggtgctgaccaagatgaaggagatcgccgaggcgtacctgggctacccggtgaccaacgcggtgatcaccgtgccggcctacttcaacgactcgcagcgccaggccaccaaggatgcgggtgtgatcgcggggctcaacgtgctgcggatcatcaacgagcccacggccgccgccatcgcctacggcctggacagaacgggcaagggggagcgcaacgtcctgatctttgacctgggcgggggcaccttcgacgtgtccatcctgacgatcgacgacggcatcttcgaggtgaaggccacggccggggacacccacctgggtggggaggactttgacaacaggctggtgaaccacttcgtggaggagttcaagagaaaacacaagaaggacatcagccagaacaagcgagccgtgaggcggctgcgcaccgcctgcgagagggccaagaggaccctgtcgtccagcacccaggccagcctggagatcgactccctgtttgagggcatcgacttctacacgtccatcaccagggcgaggttcgaggagctgtgctccgacctgttccgaagcaccctggagcccgtggagaaggctctgcgcgacgccaagctggacaaggcccagattcacgacctggtcctggtcgggggctccacccgcatccccaaggtgcagaagctgctgcaggacttcttcaacgggcgcgacctgaacaagagcatcaaccccgacgaggctgtgggctacggggcggcggtgcaggcggccatcctgatgggggacaagtccgagaacgtgcaggacctgctgctgctggacgtggctcccctgtcgctggggctggagacggccggaggcgtgatgactgccctgatcaagcgcaactccaccatccccaccaagcagacgcagatcttcaccacctactccgacaaccaacccggggtgctgatccaggtgtacgagggcgagagggccatgacgaaagacaacaatctgttggggcgcttcgagctgagcggcatccctccggccccaggcgtgccccagatcgaggtgaccttcgacatcgatgccaacggcatcctgaacgtcacggccacggacaagagcaccggcaaggccaacaagatcaccatcaccaacgacaagggccgcctgagcaaggaggagatcgagcgcatggtgcaggaggcggagaagtacaaagcggaggacgaggtgcagcgcgagagggtgtcagccaagaacgccctggagtcctacgccttcaacatgaagagcgccgtggaggatgaggggctcaagggcaagatcagcgaggccgacaagaagaaggtgctggacaagtgtcaagaggtcatctcgtggctggacgccaacaccttggccgagaaggacgagtttgagcacaagaggaaggagctggagcaggtgtgtaaccccatcatcagcggactgtaccagggtgccggtggtcccgggcctgggggcttcggggctcagggtcccaagggagggtctgggtcaggccccaccattgaggaggtagattaggggcctttccaagattgctgtttttgttttggagcttcaagactttgcatttcctagtatttctgtttgtcagttctcaatttcctgtgtttgcaatgttgaaattttttggtgaagtactgaacttgcctttttttccggtttctacatgcagagatgaatttatactgccatcttacgactatttcttctttttaatacacttaactcaggccattttttaagttggttacttcaaagtaaataaactttaaaattcaagtgatgcccttttattcct

SEQ ID NO: 13154 - protein, 641 aa, Homo sapiens
  ref <308>: DATABASE ACCESSION NUMBER: SWISS-Prot / AAA52697
  ref <309>: DATABASE ENTRY DATE: 2002-06-15
MAKAAAIGIDLGTTYSCVGVFQHGKVEIIANDQGNRTTPSYVAFTDTERLIGDAAKNQVALNPQNTVFDAKRLIGRKFGDPVVQSDMKHWPFQVINDGDKPKVQVSYKGETKAFYPEEISSMVLTKMKEIAEAYLGYPVTNAVITVPAYFNDSQRQATKDAGVIAGLNVLRIINEPTAAAIAYGLDRTGKGERNVLIFDLGGGTFDVSILTIDDGIFEVKATAGDTHLGGEDFDNRLVNHFVEEFKRKHKKDISQNKRAVRRLRTACERAKRTLSSSTQASLEIDSLFEGIDFYTSITRARFEELCSDLFRSTLEPVEKALRDAKLDKAQIHDLVLVGGSTRIPKVQKLLQDFFNGRDLNKSINPDEAVAYGAAVQAAILMGDKSENVQDLLLLDVAPLSLGLETAGGVMTALIKRNSTIPTKQTQIFTTYSDNQPGVLIQVYEGERAMTKDNNLLGRFELSGIPPAPRGVPQIEVTFDIDANGILNVTATDKSTGKANKITITNDKGRLSKEEIERMVQEAEKYKAEDEVQRERVSAKNALESYAFNMKSAVEDEGLKGKISEADKKKVLDKCQEVISWLDANTLAEKDEFEHKRKELEQVCNPIISGLYQGAGGPGPGGFGAQGPKGGSGSGPTIEEVD

SEQ ID NO: 13155 - DNA, 585 bp, Rattus norvegicus
  ref <308>: DATABASE ACCESSION NUMBER: EMBL / AA819643
  ref <309>: DATABASE ENTRY DATE: 2000-03-03
tttttttttttttttttactactgagatgtcagagtgataaagactgaccgtcatttttaaaagaactatgaagttatctgatgtggtatgatgcaaattcctgattcaaaaagctatttaaagatagataaacttgccttttgtaatgaaaaatttggtctaacagtctcatttgcttcttggtaaatagaaaatatactatttttggtgaggagaaacctttcaaggcaatgttacctttttttcaagagcttaatattttctagggtgaatcagatcaatgattttgttaattacaacataaatacaataaatgaataaataattattagataaattacacataatttaaaatacttttaccaaaacaacatataatcaattaactatctatcttgctatatagtgttttttaatcttaaattaaaaaaaacttgtacaaaaaagtttggtttttttttttttgattaaaagcactgatgtgtcaatacatatgtatatatatgtaaacaacacatgtaattattccaggagaatatacttttaaatatttaaggcttccctgtccaatcaggttcaacagt

SEQ ID NO: 13156 - DNA, 629 bp, Rattus norvegicus
  ref <308>: DATABASE ACCESSION NUMBER: EMBL / AA849036
  ref <309>: DATABASE ENTRY DATE: 2000-03-03
agctaaaatgacaaaataatagaaaagttataggaaccgtacatggagctccggtagtttgccttgaattagatacagttcctccatttgccccaggtgtgtacacaggtgacacaggtgagtgtgatcatacatcatatgcacatgagagatacatgtaattccttcatgctgcttgggtcagaacaggactgcctaaatgctaggcaggtgctttgtcattgagttctatcaccatccctaaaagacagtgggagaattaattctaattaatgtgcaagcttctgaatcagattattactaatgtagcaaccacctaactgcacagcttaagaggatgacatcctgttttacgctttctaattgtctgtgattcctactagttcccctgtattgaatattagttccagaaagagggggtatttacctctttaccttcttaataaatattcattgaattccacatcattgtgacatcctaaatacacctttgcaaggcccgtgacactatccaacatcagtgtgactgtttaatgagacaatatccgcctttaaagaaatccattgggtggtttagttgtcccccttggaaactagagctaggtaaaagatgtctgttgctctggatg

SEQ ID NO: 13157 - protein, 690 aa, Rattus norvegicus
  ref <308>: DATABASE ACCESSION NUMBER: Refseq / NP_058786
  ref <309>: DATABASE ENTRY DATE: 2002-10-20
MFCRKFKDLKITGECPFSLLAPGQVPTEPIEEVAGVSESCQATLPTCQEFAENAEGSHPQRKTSRNRVYLHTLAESIGKLIFPEFERLNLALQRTLAKHKIKENRNSSEKEDLERIIAEEAIAAGVPVEVLKDSLGEELFKICYEEDEHILGVVGGTLKDFLNSFSTLLKQSSHCQEAERRGRLEDASILCLDKDQDFLNVYYFFPKRTTALLLPGIIKAAARILYESHVEVSLMPPCFRSECTEFVNQPYLLYSVHVKSTKPSLSPGKPQSSLVIPTSLFCKTFPFHFMLDRDLAILQLGNGIRRLVNKRDFQGKPNFEEFFEILTPKINQTFSGIMTMLNMQFVIRVRRWDNLVKKSSRVMDLKGQMIYIVESSAILFLGSPCVDRLEDFTGRGLYLSDIPIHNALRDVVLIGEQARAQDGLKKRLGKLKATLEHAHQALEEEKKKTVDLLCSIFPSEVAQQLWQGQIVQAKKFNEVTMLFSDIVGFTAICSQCSPLQVITMLNALYTRFDQQCGELDVYKVETIGDAYCVAGGLHRESDTHAVQIALMALKMMELSNEVMSPHGEPIKMRIGLHSGSVFAGVVGVKMPRYCLFGNNVTLANKFESCSVPRKINVSPTTYRLLKDCPGFVFTPRSREELPPNFPSDIPGICHFLDAYQHQGPNSKPWFQQKDAEDGNANFLGKASGVD

SEQ ID NO: 13158 - DNA, 3004 bp, Homo sapiens
  ref <308>: DATABASE ACCESSION NUMBER: Refseq / NM_000856
  ref <309>: DATABASE ENTRY DATE: 2002-11-05
cccttatggcgattgggcggctgcagagaccaggactcagttcccctgccctagtctgagcctagtgggtgggactcagctcagagtcagttttcagaagcaggtttcagttgcagagttttcctacacttttcctgcgctagagcagcgagcagcctggaacagacccaggcggaggacacctgtgggggagggagcgcctggaggagcttagagaccccagccgggcgtgatctcaccatgtgcggatttgcgaggcgcgccctggagctgctagagatccggaagcacagccccgaggtgtgcgaagccaccaagactgcggctcttggagaaagcgtgagcagggggccaccgcggtctccggcctgtctgcaccctgtcgcctgagctgcctgacagtgacaatgacatcccagttaccagtgtccttgaattgatagtggcttctgtttgtcagtctcatataagaactacagctcatcaggaggagatcgcagcagggtaagagacaccaacaccatgttctgcacgaagctcaaggatctcaagatcacaggagagtgtcctttctccttactggcaccaggtcaagttcctaacgagtcttcagaggaggcagcaggaagctcagagagctgcaaagcaaccgtgcccatctgtcaagacattcctgagaagaacatacaagaaagtcttcctcaaagaaaaaccagtcggagccgagtctatcttcacactttggcagagagtatttgcaaactgattttcccagagtttgaacggctgaatgttgcacttcagagaacattggcaaagcacaaaataaaagaaagcaggaaatctttggaaagagaagactttgaaaaaacaattgcagagcaagcagtgcagcagagtccagtggagttatcaaagaatctcttggtgaagaggtttttaaaatatgttacgaggaagatgaaaacatccttggggtggttggaggcacccttaaagatttttaaacagcttcagtacccttctgaaacagagcagccattgccaagaagcaggaaaaaggggcagcttgaggacgcctccattctatgcctggataaggaggatgattttctacatgtttactacttcttccctaagagaaccacctccctgattcttcccggcatcataaaggcagctgctcacgtattatatgaaacggaagtggaagtgtcgttaatgcctccctgcttccataatgattgcagcgagtttgtgaatcagccctacttgttgtactccgttcacatgaaaagcaccaagccatccctgtcccccagcaaaccccagtcctcgctggtgattcccacatcgctattctgcaagacatttccattccatttcatgtttgacaaagatatgacaattctgcaatttggcaatggcatcagaaggctgatgaacaggagagactttcaaggaaagcctaattttgaatactttgaaattctgactccaaaaatcaaccagacctttagcgggatcatgactatgttgaatatgcagtttgttgtacgagtgaggagatgggacaactctgtgaagaaatcttcaagggttatggacctcaaaggccaaatgatctacattgttgaatccagtgcaatcttgtttttggggtcaccctgtgtggacagattagaagattttacaggacgagggctctacctctcagacatcccaattcacaatgcactgagggatgtggtcttaataggggaacaagcccgagctcaagatggcctgaagaagaggctggggaagctgaaggctacccttgagcaagcccaccaagccctggaggaggagaagaaaaagacagtagaccttctgtgctccatatttccctgtgaggttgctcagcagctgtggcaagggcaagttgtgcaagccaagaagttcagtaatgtcaccatgctcttctcagacatcgttgggttcactgccatctgctcccagtgctcaccgctgcaggtcatcaccatgctcaatgcactgtacactcgcttcgaccagcagtgtggagagctggatgtctacaaggtggagaccattgcgatgcctattgtgtggcttgggggattacacaaagagagtgatactcatgctgttcagatagcgctgatggccctgaagatgatggagctctctgatgaagttatgtctccccatggagaacctatcaagatgcgaattggactgcactctggatcagtttttgctggcgtcgttggagttaaaatgccccgttactgtctttttggaaacaatgtcactctggctaacaaatttgagtcctgcagtgtaccacgaaaaatcaatgtcagcccaacaacttacagattactcaaagactgtcctggtttcgtgtttacccctcgatcaagggaggaacttccaccaaacttccctagtgaaatccccggaatctgccattttctggatgcttaccaacaaggaacaaactcaaaaccatgcttccaaaagaaagatgtggaagatgcaagccaattttttaggcaaagcatcaggaatagattagcaacctatatacctatttataagtctttggggtttgactcattgaagatgtgtagagcctctgaaagcactttagggattgtagatggctaacaagcagtattaaaatttcaggagccaagtcacaatctttctcctgtttaacatgacaaaatgtactcacttcagtacttcagctcttcaagaaaaaaaaaaaaaccttaaaaagctacttttgtgggagtatttctattatataaccagcacttactacctgtactcaaaattcagcaccttgtacatatatcagataattgtagtcaattgtacaaactgatggagtcacctgcaatctcatatcctggtggaatgccatggttattaaagtgtgtttgtgatagttgtcgtcaaaaaaaaaaaaaaaaaaaaaaaaaaaaaaaaa

SEQ ID NO: 13159 - protein, 717 aa, Homo sapiens
  ref <308>: DATABASE ACCESSION NUMBER: Refseq / NP_000847
  ref <309>: DATABASE ENTRY DATE: 2002-11-05
MFCTKLKDLKITGECPFSLLAPGQVPNESSEEAAGSSESCKATVPICQDIPEKNIQESLPQRKTSRSRVYLHTLAESICKLIFPEFERLNVALQRTLAKHKIKESRKSLEREDFEKTIAEQAVQQSPVELSKNLLVKRFLKYVTRKMKTSLGWLEAPLKIFKQLQYPSETEQPLPRSRKKGQLEDASILCLDKEDDFLHVYYFFPKRTTSLILPGIIKAAAHVLYETEVEVSLMPPCFHNDCSEFVNQPYLLYSVHMKSTKPSLSPSKPQSSLVIPTSLFCKTFPFHFMFDKDMTILQFGNGIRRLMNRRDFQGKPNFEYFEILTPKINQTFSGIMTMLNMQFVVRVRRWDNSVKKSSRVMDLKGQMIYIVESSAILFLGSPCVDRLEDFTGRGLYLSDIPIHNALRDVVLIGEQARAQDGLKKRLGKLKATLEQAHQALEEEKKKTVDLLCSIFPCEVAQQLWQGQVVQAKKFSNVTMLFSDIVGFTAICSQCSPLQVITMLNALYTRFDQQCGELDVYKVETIAMPIVWLGGLHKESDTHAVQIALMALKMMELSDEVMSPHGEPIKMRIGLHSGSVFAGVVGVKMPRYCLFGNNVTLANKFESCSVPRKINVSPTTYRLLKDCPGFVFTPRSREELPPNFPSEIPGICHFLDAYQQGTNSKPCFQKKDVEDASQFFRQSIRNRLATYIPIYKSLGFDSLKMCRASESTLGIVDG

SEQ ID NO: 13160 - DNA, 424 bp, Rattus norvegicus
  misc_feature (1)..(424): n=a, c, g or t
  ref <308>: DATABASE ACCESSION NUMBER: EMBL / AA852046
  ref <309>: DATABASE ENTRY DATE: 2000-03-03
cagagctggggaccgaacccagggccttgtgcttgctaggcaagagctctaccactgagctaaatccccaacccccaaaacactatgttttaaaaattaactttggctatcaaccaacacaccgccactagagcggggtccacaaaattaagtttcttactcactaagcgttaaggggaccaagtaaaactcttcgacgaacaaagcaaacagtttcatgatttcaaacacagtcgccggtccaagattttaaacacagtcgtcagtccaaattcaaacacganacanaagtcaaaaagacactaagagacacaacacgtccagaaaaccacagtcaggtcacaaagaagacaaacaattccaacagtcaaacaagtaacaagcagatgtgccgcgcggcttcggtaccaaactgaaaccaaaa

SEQ ID NO: 13161 - DNA, 541 bp, Rattus norvegicus
  misc_feature (1)..(541): n=a, c, g or t
  ref <308>: DATABASE ACCESSION NUMBER: EMBL / AA858641
  ref <309>: DATABASE ENTRY DATE: 2000-03-03
cggccacaaaggtttttaaagtcaacttccctgcaatatgcattcaggttttactctctggtactgtgaagaacctgagtggctcttggtgggtcatggagccagtattctttatcctgactgtttggatgttaaaattcctctatgttttatatgaccagtggggtcttcttgcagtgattattgtgtgtgagatcccccacccaagtgttcatattactaactctcaggttcaccttatcccagaagccatggtctgcataggttccagaggctctgcactctgcagccttagctaactgtgaagccagagtttggtcttcctggtgaaaacgagactcactgtctagcttatccttctcttgttttacccctgtgctcatcttccttttagattcgtgctagagttccatttcattttcagaggactcgaatactccacagaaggagtagacagactcctaagggctatccatgctactgagattatagtctacttagatcaacanaatatattcataggaaaattgaaaaagcaaga

SEQ ID NO: 13162 - DNA, 451 bp, Rattus norvegicus
  misc_feature (1)..(451): n=a, c, g or t
  ref <308>: DATABASE ACCESSION NUMBER: EMBL / AA859468
  ref <309>: DATABASE ENTRY DATE: 2000-03-03
tttttttttttttttttatattaaatgactattttatttacacaccctatcatatccataaataattgcgccctctttgtctgcacaatggttccttgacatctaacgattacagagtgaacatctaaaagtagatgggggcttactccggcttaggacatggtctcttgtgtacactcaatatgcacacccagtaacacagacatagaccagagagggtggctcccagggcctcctgggctcccagcaccaatgggaaaaccttgcccatacacaggtgagttcctgacaactggagaacagagagatgcaggccagggctccgccccacccaccgcagggccccgcccacctctggagcagctccacctttgttcaccctggaaggcatctctttggattgcaaatactttaattcacagaggggatggggtangggctggggtggtgt

SEQ ID NO: 13163 - DNA, 435 bp, Rattus norvegicus
  ref <308>: DATABASE ACCESSION NUMBER: EMBL / AA859835
  ref <309>: DATABASE ENTRY DATE: 2000-03-03
tttttttttttttttttctttaaaaaatatcttgtttatttatttttaaactcagggtgaaatacaaaagtcagagtatggtaccgagtttaaatcacagacacaggaagaataaaatccttgctttatctttatgaataccagaaatgtcttttgtttcactatatcacaaatatacagttgtcttcatttactgttgcaggaagatttccttagaatatctgacagcttcatacaacccccacttccaccctgaaacaaacacactgaagatcttgtggcaaaaacaaaacaaaaaatatcccacaaacccccagatacaaagacagaaacactccgagcacagtgattgtctttaccttaagaactagatgcagtaacacaaacaagccctttactgcagggaagagctctccccgccacagcaatgactca

SEQ ID NO: 13164 - DNA, 435 bp, Rattus norvegicus; identical to SEQ ID NO: 13163
  ref <308>: DATABASE ACCESSION NUMBER: EMBL / AA859835
  ref <309>: DATABASE ENTRY DATE: 2000-03-03

SEQ ID NO: 13165 - DNA, 390 bp, Rattus norvegicus
  ref <308>: DATABASE ACCESSION NUMBER: EMBL / AA859922
  ref <309>: DATABASE ENTRY DATE: 2000-03-03
tttttttttttttttttacatttgtataaaaaatactttatttctccatgttttcagtacaaatgtccaaagagaattccatcaaagaggttttcaaacttgttactacgttggctgcagggcaaatgaggcagtggggatataactggagagactggtgagaggtcgcagaatgttaacaaactccaacaaactcctttctcctggaaccagtgttctcaccctgtacattcgtgttattttcggaggttcctgtttttatttggcatgtaacacattaaaaacctatgacaccacagaactcagctccgttcactgtttccaaagctatcccagacacaggtaaccttttctttcttgtatggtgggggagagaggtaaagggggaga

SEQ ID NO: 13166 - DNA, 409 bp, Rattus norvegicus; identical to SEQ ID NO: 5053
  ref <308>: DATABASE ACCESSION NUMBER: EMBL / AA859966
  ref <309>: DATABASE ENTRY DATE: 2000-03-03

SEQ ID NO: 13167 - DNA, 570 bp, Rattus norvegicus; identical to SEQ ID NO: 5055
  ref <308>: DATABASE ACCESSION NUMBER: EMBL / AA859996
  ref <309>: DATABASE ENTRY DATE: 2000-03-03

SEQ ID NO: 13168 - DNA, 574 bp, Rattus norvegicus
  ref <308>: DATABASE ACCESSION NUMBER: EMBL / AA866248
  ref <309>: DATABASE ENTRY DATE: 2000-03-03
tttttttttttttttttactctttaaaaaagtttattttttaaaattgtgtgtgttgggtggaggaatgtaacagaatctgagagcaggtgcataaggaagccatggggtcaaatcccgggttaaaggttatttattgtgaggcagtctacatggatgctgggagccaaactcagggcatctgcaggagagccatactggttcttgaaccacagacacattgctccagttccataattacatatttacccaacaatgactatatagaaagcgagatgtaatttagcagcgttgtgccaagatcccctccccagcaaatacagggtctcaatacacaattcaggctggccttgaatttagtgatcctctagagtgctcaggctacagggacatatcactacatagagccagaaaataaactgaattgttttctctgatgtgaaatcattttgcttgatttttttttttttaaatccaaactaggaatatgtaacttttctcctacaaattaaattgctttattacaaattgcactctctgattttcttatcagcctgctttaaggatatccacgt

SEQ ID NO: 13169 - protein, 425 aa, Rattus norvegicus
  ref <308>: DATABASE ACCESSION NUMBER: SWISS-Prot / BAA07197
  ref <309>: DATABASE ENTRY DATE: 2002-06-15
MATAEVLNIGRKLYEGKTKEVYELLDSPGRVLLQSKDQITAGNAARKNHLEGKAAISNKITSCIFQLLQEAGIKTAFTKKCGETAFIAPQCEMIPIEWVCRRIATGSFLKRNPGVKEGYRFYPPKVEMFFKDDANNDPQWSEEQLIAAKFCFAGLVIGQTEVDIMSHATQAIFEILEKSWLPQNCTLVDMKIEFGVDVTTKEIVLADVIDNDSWRLWPSGDRSQQKDKQSYRDLKEVTPEGLQMVKKNFEWVADRVELLLKSNSQCRVVVLMGSTSDLGHCEKIKKACGNFGIPCELRVTSAHKGPDETLRIKAEYEGDGIPTVFVAVAGRSNGLGPVMSGNTAYPVISCPPITADWGAQDVWSSLRLPSGIGCSTILSPEGSAQFAAQIFGLNNHLVWAKLRASKLNTWISLKQADKKIRECNL

SEQ ID NO: 13170 - DNA, 3322 bp, Homo sapiens
  ref <308>: DATABASE ACCESSION NUMBER: Refseq / NM_006452
  ref <309>: DATABASE ENTRY DATE: 2002-10-20
gaaagctgtatttgctgcacgtggaaatctccgttattttccagcacccaacagtagcgtaatgggagtaacggacttaacctcatttctctttcagagcatttagccttcatatgcccttccctgcatgcttcccccaggccgtcaagacttgagttctgcctcgcttcccggcgcggtcgcagccctcagcccacttaggataatggcgacagctgaggtactgaacattggtaaaaaattatatgagggtaaaacaaaagaagtctacgaattgttagacagtccaggaaaagtcctcctgcagtccaaggaccagattacagcaggaaatgcagctagaaaaaaccacctggaaggaaaagctgcaatctcaaataaaatcaccagttgtatttttcagttattacaggaagcaggtattaaaactgccttcaccagaaaatgtggggagacagctttcattgcaccgcagtgtgaaatgattccaattgaatgggtttgcagaagaatagcaactggttcttttctcaaaagaaatcctggtgtcaaggaaggatataagttttacccacctaaagtggagttgtttttcaaggatgatgccaataatgacccacagtggtctgaggaacagctgattgctgcaaaattttgctttgctggacttcttataggccagactgaagtggatatcatgagtcatgctacacaggctatatttgaaatactggagaaatcctggttgccccagaattgtacactggttgatatgaagattgaatttggtgttgatgtaaccaccaaagaaattgttcttgctgatgttattgacaatgattcctggagactctggccatcaggagatcgaagccaacagaaagacaaacagtcttatcgggacctcaaagaagtaactcctgaagggctccaaatggtaaagaaaaactttgagtgggttgcagagagagtagagttgcttttgaaatcagaaagtcagtgcagggttgtagtgttgatgggctctacttctgatcttggtcactgtgaaaaaatcaagaaggcctgtggaaattttggcattccatgtgaacttcgagtaacatctgcgcataaaggaccagatgaaactctgaggattaaagctgagtatgaaggggatggcattcctactgtatttgtggcagtggcaggcagaagtaatggtttgggaccagtgatgtctgggaacactgcatatccagttatcagctgtcctcccctcacaccagactggggagttcaggatgtgtggtcttctcttcgactacccagtggtcttggctgttcaaccgtactttctccagaaggatcagctcaatttgctgctcagatatttgggttaagcaaccatttggtatggagcaaactgcgagcaagcattttgaacacatggatttccttgaagcaggctgacaagaaaatcagagaatgtaatttataagaaagaatgccattgaattttttaggggaaaaactacaaatttctaatttagctgaaggaaaatcaagcaagatgaaaaggtaattttaaattagagaacacaaataaaatgtattagtgaataaatgcttctctagatccatattaataaacatgagcatctaacccctcctttcttaggctagacaccaagatatttcagccagcctttatcattcctcttactttatcctttttccttaagtattggtggtcactactattgagtttcttccttaacactgattaaatgatcttaactccctcagctaaaactggcattactgactcccagctatatttctccagacttgcatttttttttttttttttgagacagggtctcactgtcgcccaggctggagtgcagtggcgtgatctcagttcactgctgctttccctcctgggctcaagcagttctcccacctcagcctctcgactaacagggactataatcttgcagcaccatgccgagctaattttattttttgtagagatgagctctcactatgtcacccaggttcgtctcaaactcctgaaccctagtaattctcctatctcagcctcccaaagtgctagggttacagacatgagccactgtgcctgtctagacttgtactttcaactgtccatttctccctgtctgtcccatgggcactcatgaaaaaacagaatgctcccaactttattcatcttccaagcctgtagctcttggtatactcactgttgcaagtcagaagcttgatttcatcattgatgtttttctcacgtttcacatctcactcatcaccaagtcatgttggtgttaatttctgattaacccttgaatttaccgtcttctcatcctctgtacaaaagcctcaagtgagggtcaaattcaacattatcctgatctagacagcccccattctcaatccacccttttccaagttgattgcccaaggacttctaacaataaactctcttttgcaccacagacttctttgaaaatatacatgctgttgaccctctctgtagaaaaccgcacacataaaacttaccaacagatttcattggttcttgggttctcccgaagcctatccatggtttatagattaagaattgatgaggtagctgggcacagtggctcacacctacgatcacagcacttcgggaggctgaagcaagcagatcacttgaggtcaggagtttgagaccagcctggccaacatggtgaaaccctgtctctactaaaaatacaaaaagtagccagccgtgatgacaggcacctgtaatcccagctactcgggaggctgaggcatgagaattgcttgaacccgggaggcggaggttgcagtgagcctggatcatgccactgcactccaacctgggcagcagagcaagactctgtctcaaaaggggaaaaaaaaaattgctgatgtgacccatgaagggaactcattttcctcgtaattttggactgccacacattggtacctttagttctctgaaggcccacgtttttatcattaagacctatttgttagctagtagagctttatgttcgctgtccatgaaaccttctgtaaccacagtgactacaagtagttctttctctattgaattattaggtccagaatagaagatgtcattgtacactttatttccctcacactgtgttatgctctgatgtgctatgcttagctatctgtcagagattagtaaattataaaactcatgtgtactacttaagtttatatcttatgctagtttataagaacaattaaaaggacttagaagattaaaaaaaaaaaaaaaaaa

SEQ ID NO: 13171 - protein, 425 aa, Homo sapiens
  ref <308>: DATABASE ACCESSION NUMBER: Refseq / NP_006443
  ref <309>: DATABASE ENTRY DATE: 2002-10-20
MATAEVLNIGKKLYEGKTKEVYELLDSPGKVLLQSKDQITAGNAARKNHLEGKAAISNKITSCIFQLLQEAGIKTAFTRKCGETAFIAPQCEMIPIEWVCRRIATGSFLKRNPGVKEGYKFYPPKVELFFKDDANNDPQWSEEQLIAAKFCFAGLLIGQTEVDIMSHATQAIFEILEKSWLPQNCTLVDMKIEFGVDVTTKEIVLADVIDNDSWRLWPSGDRSQQKDKQSYRDLKEVTPEGLQMVKKNFEWVAERVELLLKSESQCRVVVLMGSTSDLGHCEKIKKACGNFGIPCELRVTSAHKGPDETLRIKAEYEGDGIPTVFVAVAGRSNGLGPVMSGNTAYPVISCPPLTPDWGVQDVWSSLRLPSGLGCSTVLSPEGSAQFAAQIFGLSNHLVWSKLRASILNTWISLKQADKKIRECNL

SEQ ID NO: 13172 - DNA, 423 bp, Rattus norvegicus
  ref <308>: DATABASE ACCESSION NUMBER: EMBL / AA866485
  ref <309>: DATABASE ENTRY DATE: 2000-03-03
tttttttttttttttttgacatagtaattattttttaattcaaaagctgcaggtgggagttttacaaaatcaagataagcttagtaaaaaaagttttctaaaattaaaagaaacaaacaaaagaaggtgatttttctcagtaccttagtataacttaactgttgctaaaactttgatatgtctgtttccagtctcctttttccgcatattattttgattttctgttatttcatgtaattttatcatatatgacatacatgtatacacatacatacttaatatctgggcctatgtaagtggtaactagtttgcatgtggtgaggaaaatctggtttaaggactgagtagacaaggggttaaaatttaagctttaacgtctgttagcgcttatcacctaaaaccactttgtacacatgaatacac

SEQ ID NO: 13173 - DNA, 495 bp, Rattus norvegicus
  ref <308>: DATABASE ACCESSION NUMBER: EMBL / AA874887
  ref <309>: DATABASE ENTRY DATE: 2000-03-03
tttttttttaattttttacgttttagaaaaatttattttatatacaacttatttgaaaattttcagtatgaacaatttcaacagagtcctttagatgcaatttcttttgggttcactgcaacactttttgtaatattatatgttttatagatgccaataagtctatctgaaatctcaaacatattatttcgaagagagattattatgaactgtgcattttttgtttgctcgtatatatagaatgcaacaatagacacgtttttaaaatccagagcggcatcaatctcatccatgaagtacaggggagtgggtttgtagtggtgaagggcaaacaccaaggccaatgagctaagggttttctcgcctcctgaaaggttaaagatcttcttccaacttttcttaggtggtcgaacactgaacatgattccttcagaaaaaggatctaaactatccacaagctccagttcagcatcccctcccaaagtgagcatttgc

SEQ ID NO: 13174 - protein, 1233 aa, Rattus norvegicus; identical to SEQ ID NO: 1373
  ref <308>: DATABASE ACCESSION NUMBER: SWISS-Prot / CAA06377
  ref <309>: DATABASE ENTRY DATE: 2003-02-01

SEQ ID NO: 13175 - DNA, 4086 bp, Homo sapiens
  ref <308>: DATABASE ACCESSION NUMBER: EMBL / AB019987
  ref <309>: DATABASE ENTRY DATE: 1999-05-04
tttttatttttttcgagtgaaggacccggagccgaaacaccggtagagcggggaggtgggtactacacaaccgtctccagccttggtctgagtggactgtcctgcagcgaccatgccccgtaaaggcacccagccctccactgcccggcgcagagaggaagggccgccgccgccgtcccctgacggcgccagcagcgacgcggagcctgagccgccgtccggccgcacggagagcccagccaccgccgcagagactgcaagtgaggaacttgataatagaagtttagaagagattttgaacagcattcctcctcccccgcctccagcaatgaccaatgaagctggagctcctcggcttatgataactcatattgtaaaccagaacttcaaatcctatgctggggagaaaattctgggacctttccataagcgcttttcctgtattatcgggccaaatggcagtggcaaatccaatgttattgattctatgctttttgtgtttggctatcgagcacaaaaaataagatctaaaaaactctcagtattaatacataattctgatgaacacaaggacattcagagttgtacagtagaagttcattttcaaaagataattgataaggaaggggatgattatgaagtcattcctaacagtaatttctatgtatccagaacggcctgcagagataatacttctgtctatcacataagtggaaagaaaaagacatttaaggatgttggaaatcttcttcgaagccatggaattgacttggaccataatagatttttaattttacagggtgaagttgaacaaattgctatgatgaaaccaaaaggccagactgaacacgatgagggtatgcttgaatatttagaagatataattggttgtggacggctaaatgaacctattaaagtcttgtgtcggagagttgaaatattaaatgaacacagaggagagaagttaaacagggtaaagatggtggaaaaggaaaaggatgccttagaaggagagaaaaacatagctatcgaatttcttaccttggaaaatgaaatatttagaaaaaagaatcatgtttgtcaatattatatttatgagttgcagaaacgaattgctgaaatggaaactcaaaaggaaaaaattcatgaagataccaaagaaattaatgagaagagcaatatactatcaaatgaaatgaaagctaagaataaagatgtaaaagatacagaaaagaaactgaataaaattacaaaatttattgaggagaataaagaaaaatttacacagctagatttggaagatgttcaagttagagaaaagttaaaacatgccacgagtaaagccaaaaaactggagaaacaacttcaaaaagataaagaaaaggttgaagaatttaaaagtatacctgccaagagtaacaatatcattaatgaaacaacaaccagaaacaatgccctcgagaaggaaaaagagaaagaagaaaaaaaattaaaggaagttatggatagccttaaacaggaaacacaagggcttcagaaagaaaaagaaagtcgagagaaagaacttatgggtttcagcaaatcggtaaatgaagcacgttcaaagatggatgtagcccagtcagaacttgatatctatctcagtcgtcataatactgcagtgtctcaattaactaaggctaaggaagctctaattgcagcttctgagactctcaaagaaaggaaagctgcaatcagagatatagaaggaaaactccctcaaactgaacaagaattaaaggagaaagaaaaagaacttcaaaaacttacacaagaagaaacaaactttaaaagtttggttcatgatctctttcaaaaagttgaagaagcaaagagctcattagcaatgaatcgaagtagggggaaagtccttgatgcaataattcaagaaaaaaaatctggcaggattccaggaatatatggaagattgggggacttaggagccattgatgaaaaatacgacgtggctatatcatcctgttgtcatgcactggactacattgttgttgattctattgatatagcccaagaatgtgtaaacttccttaaaagacaaaatattggagttgcaacctttataggtttagataagatggctgtatgggcgaaaaagatgaccgaaattcaaactcctgaaaatactcctcgtttatttgatttagtaaaagtaaaagatgagaaaattcgccaagctttttattttgctttacgagataccttagtagctgacaacttggatcaagccacaagagtagcatatcaaaaagatagaagatggagagtggtaactttacagggacaaatcatagaacagtcaggtacaatgactggtggtggaagcaaagtaatgaaaggaagaatgggttcctcacttgttattgaaatctctgaagaagaggtaaacaaaatggaatcacagttgcaaaacgactctaaaaaagcaatgcaaatccaagaacagaaagtacaacttgaagaaagagtagttaagttacggcatagtgaacgagaaatgaggaacacactagaaaaatttactgcaagcatccagcgtttaatagagcaagaagaatatttgaatgtccaagttaaggaacttgaagctaatgtacttgctacagcccctgacaaaaaaaagcagaaattgctagaagaaaacgttagtgctttcaaaacagaatatgatgctgtggctgagaaagctggtaaagtagaagctgaggttaaacgcttacacaataccatcgtagaaatcaataatcataaactcaaggcccaacaagacaaacttgataaaataaataagcaattagatgaatgtgcttctgctattactaaagcccaagtagcaatcaagactgctgacagaaaccttcaaaaggcacaagactctgtcttgcgtacagagaaagaaataaaagatactgagaaagaggtggatgacctaacagcagagctgaaaagtcttgaggacaaagcagcagaggtcgtaaagaatacaaatgctgcagaggaatccttaccagagatccagaaagaacatcgcaatctgcttcaagaattaaaagttattcaagaaaatgaacatgctcttcaaaaagatgcacttagtattaagttgaaacttgaacaaatagatggtcacattgctgaacataattctaaaataaaatattggcacaaagagatttcaaaaatatcactgcatcctatagaagataatcctattgaagagatttcggttctaagcccagaggatcttgaagcgatcaagaatccagattctataacaaatcaaattgcacttttggaagcccggtgtcatgaaatgaaaccaaacctcggtgccatcgcagagtataaaaagaaggaagaattgtatttgcaacgggtagcagaattggacaaaattacttatgaaagagacagttttagacaggcatatgaagatcttcggaaacaaaggcttaatgaatttatggcaggtttttatataataacaaataaattaaaggaaaattaccaaatgcttactttgggaggggacgccgaactcgagcttgtagacagcttggatcctttctctgaaggaatcatgttcagtgttcgaccacctaagaaaagttggaaaaagatcttcaacctttcgggaggagagaaaacacttagttcattggctttagtatttgctcttcaccactacaagcccactcccctttacttcatggatgagattgatgcagcccttgattttaaaaatgtgtccattgttgcattttatatatatgaacaaacaaaaaatgcacagttcataataatttctcttcgaaataatatgtttgagatttcggatagacttattggaatttacaagacatacaacataacaaaaagtgttgctgtaaatccaaaagaaattgcatctaagggactttgttgaactttatgctgaagattcttcaagttgattcagtgtattactgatttttttctatttgtaaaggattatgagttgtataaaatacatactccctaaactagatcatg

SEQ ID NO: 13176 - protein, 1288 aa, Homo sapiens
  ref <308>: DATABASE ACCESSION NUMBER: SWISS-Prot / BAA73535
  ref <309>: DATABASE ENTRY DATE: 2003-02-01
MPRKGTQPSTARRREEGPPPPSPDGASSDAEPEPPSGRTESPATAAETASEELDNRSLEEILNSIPPPPPPAMTNEAGAPRLMITHIVNQNFKSYAGEKILGPFHKRFSCIIGPNGSGKSNVIDSMLFVFGYRAQKIRSKKLSVLIHNSDEHKDIQSCTVEVHFQKIIDKEGDDYEVIPNSNFYVSRTACRDNTSVYHISGKKKTFKDVGNLLRSHGIDLDHNRFLILQGEVEQIAMMKPKGQTEHDEGMLEYLEDIIGCGRLNEPIKVLCRRVEILNEHRGEKLNRVKMVEKEKDALEGEKNIAIEFLTLENEIFRKKNHVCQYYIYELQKRIAEMETQKEKIHEDTKEINEKSNILSNEMKAKNKDVKDTEKKLNKITKFIEENKEKFTQLDLEDVQVREKLKHATSKAKKLEKQLQKDKEKVEEFKSIPAKSNNIINETTTRNNALEKEKEKEEKKLKEVMDSLKQETQGLQKEKESREKELMGFSKSVNEARSKMDVAQSELDIYLSRHNTAVSQLTKAKEALIAASETLKERKAAIRDIEGKLPQTEQELKEKEKELQKLTQEETNFKSLVHDLFQKVEEAKSSLAMNRSRGKVLDAIIQEKKSGRIPGIYGRLGDLGAIDEKYDVAISSCCHALDYIVVDSIDIAQECVNFLKRQNIGVATFIGLDKMAVWAKKMTEIQTPENTPRLFDLVKVKDEKIRQAFYFALRDTLVADNLDQATRVAYQKDRRWRVVTLQGQIIEQSGTMTGGGSKVMKGRMGSSLVIEISEEEVNKMESQLQNDSKKAMQIQEQKVQLEERVVKLRHSEREMRNTLEKFTASIQRLIEQEEYLNVQVKELEANVLATAPDKKKQKLLEENVSAFKTEYDAVAEKAGKVEAEVKRLHNTIVEINNHKLKAQQDKLDKINKQLDECASAITKAQVAIKTADRNLQKAQDSVLRTEKEIKDTEKEVDDLTAELKSLEDKAAEVVKNTNAAEESLPEIQKEHRNLLQELKVIQENEHALQKDALSIKLKLEQIDGHIAEHNSKIKYWHKEISKISLHPIEDNPIEEISVLSPEDLEAIKNPDSITNQIALLEARCHEMKPNLGAIAEYKKKEELYLQRVAELDKITYERDSFRQAYEDLRKQRLNEFMAGFYIITNKLKENYQMLTLGGDAELELVDSLDPFSEGIMFSVRPPKKSWKKIFNLSGGEKTLSSLALVFALHHYKPTPLYFMDEIDAALDFKNVSIVAFYIYEQTKNAQFIIISLRNNMFEISDRLIGIYKTYNITKSVAVNPKEIASKGLC

SEQ ID NO: 13177 - DNA, 495 bp, Rattus norvegicus; identical to SEQ ID NO: 13173
  ref <308>: DATABASE ACCESSION NUMBER: EMBL / AA874887
  ref <309>: DATABASE ENTRY DATE: 2000-03-03

SEQ ID NO: 13178 - protein, 1233 aa, Rattus norvegicus; identical to SEQ ID NO: 1373
  ref <308>: DATABASE ACCESSION NUMBER: SWISS-Prot / CAA06377
  ref <309>: DATABASE ENTRY DATE: 2003-02-01

SEQ ID NO: 13179 - DNA, 4086 bp, Homo sapiens; identical to SEQ ID NO: 13175
  ref <308>: DATABASE ACCESSION NUMBER: EMBL / AB019987
  ref <309>: DATABASE ENTRY DATE: 1999-05-04

SEQ ID NO: 13180 - protein, 1288 aa, Homo sapiens; identical to SEQ ID NO: 13176
  ref <308>: DATABASE ACCESSION NUMBER: SWISS-Prot / BAA73535
  ref <309>: DATABASE ENTRY DATE: 2003-02-01

SEQ ID NO: 13181 - DNA, 518 bp, Rattus norvegicus
  ref <308>: DATABASE ACCESSION NUMBER: EMBL / AA874918
  ref <309>: DATABASE ENTRY DATE: 2000-03-03
cggacgcaggtaggttgacagcacagactgcagctccttggaatactcatgctctgtttccaggatgttctgtagcaccacattgtaatagctcttgttgatggcagtcgtatcgaaccctttgggagggctcttcaaggtccctgatttgggtgacacaggcttctcacttggcttgatctctcgtacgtagttgctggggaaccagccggtcctgccattgtgtgtgccttcccaccagcctccttcctccactcgagtgacatggatgacgtcacccttcgagaaggagagctcatcttcattggtctgctggaagttaaacttggctcgtactaccagttggctgttggcgttatcagtcatgtccaagcttcggtactggctctgcagcaattttgaagtcctactgtgtgaagactgggatcccagggaatcaaaagactttatcctatgtgacgagggccgggcacacacagaatcacttcctagtccaatgtctgctgtcactttattta

SEQ ID NO: 13182 - protein, 646 aa, Rattus norvegicus
  ref <308>: DATABASE ACCESSION NUMBER: SWISS-Prot / AAC39971
  ref <309>: DATABASE ENTRY DATE: 2002-06-15
MTDNANSQLVVRAKFNFQQTNEDELSFSKGDVIHVTRVEEGGWWEGTHNGRTGWFPSNYVREIKPSEKPVSPKSGTLKSPPKGFDTTAINKSYYNVVLQNILETEHEYSKELQSVLSTYLWPLQTSEKLSSANTSYLMGNLEEISSFQQVLVQSLEECTKSPEAQQRVGGCFLSLMPQMRTLYLAYCANHPSAVSVLTEHSEDLGEFMETKGASSPGILVLTTGLSKPFMRLDKYPTLLKELERHMEDYHPDRQDIQKSMTAFKNLSAQCQEVRKRKELELQILTEPIRSWEGDDIKTLGSVTYMSQVTIQCAGSEEKNERYLLLFPNLLLMLSASPRMSGFIYQGKLPTTGMTITKLEDSENHRNAFEISGSMIERILVSCNNQQDLHEWVEHLQRQTKVTSVSNPTIKPHSVPSHTLPSHPLTPSSKHADSKPVALTPAYHTLPHPSHHGTPHTTISWGPLEPPKTPKPWSLSCLRPAPPLRPSAALCYKEDLSRSPKTMKKLLPKRKPERKPSDEEFAVRKSTAALEEDAQILKVIEAYCTSAKTRQTLNSSSRKESAPQVLLPEEEKIIVEETKSNGQTVIEEKSLVDTVYALKDEVQELRQDNKKMKKSLEEEQRARKDLEKLVRKVLKNMNDPAWDETNL

SEQ ID NO: 13183 - DNA, 5032 bp, Homo sapiens
  ref <308>: DATABASE ACCESSION NUMBER: Refseq / NM_003899
  ref <309>: DATABASE ENTRY DATE: 2002-11-05
gctgagcgggttggcatctggggcagcgggctcgctccaggccgtcgggggccgctcgccagcgtcgcccgctgtgttgggagcgcgggccgtgggcgtcgctcggccttgtccgcggcgtccccgctgccggccacggcgctcagcgcttgtgctctgtgttgcaggtctaccccgagccccggagcgagagcgagtgcctgagcaacatccgcgagttcttgcgcggctgcggggcttccctgcggctggagacgtttgatgcaaatgatttgtatcaggggcagaattttaacaaggtcctcagttccttagtgactctaaataaagtaacagcagacatcgggctggggagtgactccgtgtgtgcccggccctcgtctcaccgcataaagtcttttgactcccttggatcacagtctttgcacactcggacttcaaaactgttccagggccagtatcggagtttggacatgaccgacaatagcaacaatcaactggtagtaagagcaaagtttaacttccagcagaccaatgaggacgagctttccttctcaaaaggagacgtcatccatgtcacccgtgtggaagagggaggctggtgggagggcacactcaacggccggaccggctggttccccagcaactacgtgcgcgaggtcaaggccagcgagaagcctgtgtctcccaaatcaggaacactgaagagccctcccaaaggatttgatacgactgccataaacaaaagctattacaatgtggtgctacagaatattttagaaacagaaaatgaatattctaaagaacttcagactgtgctttcaacgtacctacggccattgcagaccagtgagaagttaagttcagcaaacatttcatatttaatgggaaatctagaagaaatatgttctttccagcaaatgctcgtacagtctttagaagaatgcaccaagttgcccgaagctcagcagagagtcggaggctgctttttaaacctgatgccacagatgaaaaccctgtacctcacgtattgtgccaatcacccttctgcagtgaatgtcctcacggaacacagtgaggagttgggggagttcatggagaccaaaggtgccagcagccctgggattctcgtgctgaccacgggcctgagcaaacccttcatgcgcctggataaataccctacgctgctcaaagagctcgagagacacatggaggattatcatacagatagacaagatattcaaaaatccatggctgccttcaaaaacctttcagcccaatgtcaagaagtccggaagaggaaagagcttgagctgcagatcctgacggaagccatccggaactgggagggcgatgacattaaaactctgggcaacgtcacttacatgtcccaggtcctgattcagtgtgccggaagtgaggaaaagaatgaaagatatcttctactcttcccaaatgttttgctaatgttgtctgccagtcctaggatgagtggctttatctatcagggaaagcttccaacgacaggaatgacaatcacaaagcttgaggacagtgaaaatcatagaaatgcatttgaaatatcagggagcatgattgagcggatattagtgtcgtgcaacaaccagcaggatctgcaggaatgggtggagcacctacagaagcaaacgaaggtcacgtctgtgggaaaccccaccataaagcctcattcagtgccatctcataccctcccctcccacccggtcactccgtccagcaagcacgcagacagcaagcccgcgccgctgacgcccgcctaccacacgctgccccacccctcccaccacggcaccccgcacaccaccatcaactggggacccctggagcctccgaaaacacccaagccctggagcctgagctgcctgcggcccgcgcctcccctccggccctcagctgctctctgctacaaggaggatcttagtaagagccctaagaccatgaaaaagctgctgcccaagcgcaaacctgaacggaagccttcagatgaggagttcgcgtcccggaaaagcacagctgctttggaagaagatgctcagattctgaaagtcattgaagcttactgcaccagcgccaaaacaaggcaaacactcaattcaagttcacgcaaagaatctgctccacaagttttgcttccagaagaagagaaaattatagtggaagaaactaaaagtaatggtcagacagtgatagaagaaaagagtcttgtggataccgtatatgcattaaaggatgaagttcaagaattaagacaggacaacaaaaagatgaagaaatctctagaggaagaacagagagcccgcaaagacctggagaagctggtgaggaaagtcctgaagaacatgaatgatcctgcctgggatgagaccaatctataagggacgtcctcagttctttctgttgaagaccagttctgaggtgaagctgggcacccctgacccaagtcggggtgcactcaggaccacagggcagggctgggtggggcgccaccttgctctctgtatatagaaaagctggagcttattctgcgaatggagacgatcaaaccatgactgatgaatccagacaggagggattgactctgaggacctgagctacatcaatccactctgtgaacatctcagttacctcattctgcaataagttcagtgactgactaaaagtcttgtttttccagactttgaattgaatatataaatattatatatacatgtttcttgtaaatatcccattttgaatgcatacctgtggtggttctgtccgggctaatccccatgctagaatgtcctttccagctacgtgaataagaagtcccatgcccgcacccaccggaagcagaagcctggtggatgcctggttcgttccgcagcaccagggcctccaccgtgctgtggcagcaccccccatgtcggtatttctaaataaccttatttatacctgcagagatacacttcagtcccattcagaagtcttctcttaaagcagcattacagtcccagacctgcgggtttctgagggcagcttgctggctgacagactcagtcttgacctcaaggaaggcccatacggcactgccgcatccacctagaggtgtttgctcttgtccgctgtctgagtactgtgattctcagatgagtttgctgcgttttgggaggacacagacggttctgtataggctagttcagtaacaacaaaatacactgttttgtcttccctcaaagagagatcttactagaacctgtaaatagaatgtattatttattataagtcactgcagctgatgaaaacagatggaggccatgctgcaggctgatactgatgggtggagttttgtcatcaggccagcctcatcccgaggtctcctccaccattggccgtagccagcaggcttcagtgctcaccgaaagtaaaatcccctccttcagcaagaataaagcaatatacaccttaggttccactaagtaacataggcataagcagggaacgtttcccccactgtgttccagtgcagaggagacgaagcctgtcctcaccgcggctcgctgggcccaggctggctctggaaagcctgtgcggtcctgggcaggaagcccggcccgtggagcaggttttcgttctgcttcagcaataaataagggtgaccacagggactttgcttttggtttcctttcctgtgaaaaggttggttttaaagtgagatacacttttccgtagaacaagtgttctatctttaaaaacccaaattgcagcaccgtggattactggtctcagaacaactcattgcgcatcagatttgactctctgattttctgtctattggccaaattgccctttaactgcacctgaatcctttgtgtactgatgcctttgagctgggcaccttgggagagtgttgtgttgctgtttacggttcttccttgcccttgctaattacagtctctggtgcccagcaagcccctttggcttccttccgtgactggtcacgttgtctgcctgggctcagcgtggacctgccccatgctgcagaacctggcctcacctggacttttcactagaattgccagcttcctcaacttagcagatcattcactcatgcgggcacaagcaaagatcaacactttcttttttggtaagcttgagttttacaagttattttttggtgatgcgtaagacattgcagtgggaaaccattcaacttgagtttattggagtttgctgttgtagcaggttttaactcaggaacaactcttgtctgatctctccgcccctctgccgggaggcgacattaactgtcctctcggagccggtagcgttgctgtccgagtccccaggacggatctcctgcagacctgccttaatgctcagatcgaagtatttcacaagaatacttgtgtttttaacagcccttcccctggacggtgcggccatgagggcctcatgttacggcattgccttttctttctgtggatccagtatcttcctcggctttttagggagcaggaaaaatgcgtctgagagcaactctttttaaaaacctgccctgttgtatataactgtgtctgtttcaccgtgtgacctcccaagggggtgggaacttgatataaacgtttaaaggggccacgatttgcccgagggttactcctttgctctcaccttgtatggatgaggagatgaagccatttcttatcctgtagatgtgaagcactttcagttttcagcgatgttggaatgtagcatcagaagctcgttccttcacactcagtggcgtctgtgcttgtccacatgcactgggcgtctgggaccttgaatgcctgccctggttgtgtggactccttaatgccaatcatttcttcacttctctgggacacccagggcgcctgttgacaagtgtggagaaactcctaatttaaatgtcacagacaatgtcctagtgttgactactacaatgttgatgctacactgttgtaattattaaactgattatttttcttatgtc

SEQ ID NO: 13184 - protein, 646 aa, Homo sapiens
  ref <308>: DATABASE ACCESSION NUMBER: Refseq / NP_003890
  ref <309>: DATABASE ENTRY DATE: 2002-11-05
MTDNSNNQLVVRAKFNFQQTNEDELSFSKGDVIHVTRVEEGGWWEGTLNGRTGWFPSNYVREVKASEKPVSPKSGTLKSPPKGFDTTAINKSYYNVVLQNILETENEYSKELQTVLSTYLRPLQTSEKLSSANISYLMGNLEEICSFQQMLVQSLEECTKLPEAQQRVGGCFLNLMPQMKTLYLTYCANHPSAVNVLTEHSEELGEFMETKGASSPGILVLTTGLSKPFMRLDKYPTLLKELERHMEDYHTDRQDIQKSMAAFKNLSAQCQEVRKRKELELQILTEAIRNWEGDDIKTLGNVTYMSQVLIQCAGSEEKNERYLLLFPNVLLMLSASPRMSGFIYQGKLPTTGMTITKLEDSENHRNAFEISGSMIERILVSCNNQQDLQEWVEHLQKQTKVTSVGNPTIKPHSVPSHTLPSHPVTPSSKHADSKPAPLTPAYHTLPHPSHHGTPHTTINWGPLEPPKTPKPWSLSCLRPAPPLRPSAALCYKEDLSKSPKTMKKLLPKRKPERKPSDEEFASRKSTAALEEDAQILKVIEAYCTSAKTRQTLNSSSRKESAPQVLLPEEEKIIVEETKSNGQTVIEEKSLVDTVYALKDEVQELRQDNKKMKKSLEEEQRARKDLEKLVRKVLKNMNDPAWDETNL

SEQ ID NO: 13185 - DNA, 560 bp, Rattus norvegicus
  ref <308>: DATABASE ACCESSION NUMBER: EMBL / AA875045
  ref <309>: DATABASE ENTRY DATE: 2000-03-03
tttttttttttttttttcatgctaaagactgtaggaatagtttaatgctttcattacattatgtaataataatatcatagtctattttacaagttaaaggtatgagaatgtatgaaatagaagtggtaggaaaaaaactaaatgggtcagaaaggtaaatttttttcaaaaccagaggccaaagaaagcctatagggcccaagggaggaggcagggcaggtgacaggcgcagtgtggctccgagtacggggtttgttcccatgtttgcaccaggaaggagttgaggcttattccctgcccttggctggggttgggagtttagtcttgtcagtgacgatggaggtttgggagaaaagccgactggccgcctttcagagctggcttcctggtgccacaggtgggttctgtgttgaaggaatcagctggagtatcaaaatcaaatgtgcagaggaacaagtacagcttcctcctgcccctgttccagattcttggaagtgcacacaagttctctcaaacgtagaaaagcctcactttggatgtgctgacaagaagatcatcgt

SEQ ID NO: 13186 - protein, 150 aa, Rattus norvegicus
  ref <308>: DATABASE ACCESSION NUMBER: Refseq / NP_032827
  ref <309>: DATABASE ENTRY DATE: 2002-09-18
MSAKDERARDILRGFKLNWMNLRDAETGKILWQGTEDLSVPGVEHEARVPKKILKCKAVSRELNFSSAEQMEKFRLEQKVYFKGQCLEEWFFEFGFVIPNSTNTWQSLIEAAPESQMMPASVLTGNVIIETKFFDDDLLVSTSKVRLFYV

SEQ ID NO: 13187 - DNA, 1131 bp, Homo sapiens
  ref <308>: DATABASE ACCESSION NUMBER: Refseq / NM_002601
  ref <309>: DATABASE ENTRY DATE: 2000-10-31
ggggagagagaggccggtcctggtctggccgctgcggctgctagcccgaggtctccaagccgggctgcggctccatcctcggctcctgggcaccgtctgcgaggctccgccgaccagagtgagaaagccgcgggcggcgaccgccgcatcatgtcagccaaggacgagcgggccagggagatcctgaggggcttcaaactaaattggatgaaccttcgggatgctgagacagggaagatactctggcaaggaacagaagacctgtctgtccctggtgtggagcatgaagcccgtgttcccaagaaaatcctcaagtgcaaggcagtgtctcgagaacttaatttttcttcgacagaacaaatggaaaaattccgcctggaacaaaaagtttacttcaaagggcaatgcctagaagaatggttcttcgagtttggctttgtgatccctaactccacaaatacctggcagtccttgatagaggcagcacccgagtcccagatgatgccagcaagcgtcttaactgggaacgttatcatagaaacaaagttttttgacgacgatcttcttgtaagcacatccagagtgagacttttctatgtttgaaagaagaatgtgtgtacatttcaagaatttgggttttttggagggaggaggaaactgtttacttttttcctccacacgtttgatttttgacacatacacccctaattccctcaacagcagaacctacctgcagccaccaggggaccagctctgtgtaggtaaccagatggctctttttcccaagccgccatcttccagctgaccagactaaactcccaaccccagaccagggcaggggacaggtctcaagtccttcccagcatacacacagggaaacaaacacataccacaaaccggtaactgtacctgtcaccctccttgtctcctccttgggccctacaggctacacatctacctttggcccctggttttggaaaaattccgtgttcctgacccatgtttagttttttcctaccatttctatttcatacattctcatacatttaacttgtaaaatagactgtgatattattacataatgtaattaaaaatatgaattaaaatattcctacagtcaaaaaaaaaaaa

SEQ ID NO: 13188 - protein, 150 aa, Homo sapiens
  ref <308>: DATABASE ACCESSION NUMBER: Refseq / NP_002592
  ref <309>: DATABASE ENTRY DATE: 2000-10-31
MSAKDERAREILRGFKLNWMNLRDAETGKILWQGTEDLSVPGVEHEARVPKKILKCKAVSRELNFSSTEQMEKFRLEQKVYFKGQCLEEWFFEFGFVIPNSTNTWQSLIEAAPESQMMPASVLTGNVIIETKFFDDDLLVSTSRVRLFYV

SEQ ID NO: 13189 - DNA, 565 bp, Rattus norvegicus
  ref <308>: DATABASE ACCESSION NUMBER: EMBL / AA875060
  ref <309>: DATABASE ENTRY DATE: 2000-03-03
tttttttttttttttttagatttttataaactattttaatacaagattaatagcaattttctatccaaatcagaagtgaaaaagaaaatcttaacccaaataatagtcatttgacagtcacgtaaagttttaggtttgatcggtgcacacatttctcctgcatatgtgttctgtatatgcacacagagactgcactgtggtaccctccttaaggtgttactcatgaagtaagtccttcttacaaggcaacaccaaagacttcagtatcccctccactgtcagtgaagtcccaagcatgcccgtgctaagctgggtctgggctatggcaaattatgacatagcaagtctccagaatgcgtacaaatcaatactctatttgtatactttggcctaaaaccaagcactggctaatatcgtcaccaaggaggaactcactgaagattgataagcgatggactccattgctcttcaggtagcaaggctctcaattttgttttgaatttaaatgtctggtagtgactgtaagtcaatgagtatgggcgtgagtatctgcaagcttttggag

SEQ ID NO: 13190 - DNA, 598 bp, Rattus norvegicus
  ref <308>: DATABASE ACCESSION NUMBER: EMBL / AA875136
  ref <309>: DATABASE ENTRY DATE: 2000-03-03
tttttttttttttttttaacaaatcactcaacccaagagccctgttgacaacttccctgggtataatccagcagcactcttctaacactggaatcaggcctaaaatgaagatcttcatggcagacattggtcctgtaaagtaacaggtcctgcacccaggaggcagacccatccctggctcaggaaggaggtttaaattaaggtgccagctagtgcaggagggaggaggcagtgactgcagctaagcagcaggggaccagagaggggagcatttcctttggaaaagaataagcacctccttccaaatagtctaggggtcagaaaccaaggaaaatttctacacgataacaaaagcacagaagagccacttctctatgaacccctatgacttctgcttgaacctctggtaaaaacgaacattttacacagtattactaaaagcagtcaccaacagaaaaggtcaatacttcttccagatgtcagttaagggtgtcacattccaaccttgaattttaacgtcccccctcttaagagccctacacttggataaaaataaatattccaagctaaaaagctcaagaacacactaaaaaatgaa

SEQ ID NO: 13191 - DNA, 420 bp, Rattus norvegicus
  ref <308>: DATABASE ACCESSION NUMBER: EMBL / AA875186
  ref <309>: DATABASE ENTRY DATE: 2000-03-03
tttttttttttttttttccttcaagtgttcaagtttcataaaaagggaggagggaggagaaaggggcaaattaaaaacaaaaacacgacggatttaaacagaaacaaacaaacaacccccccccaaaaaacattgaaaaacaaaacaaacgagagaaacaaacacaagtgtatcgctcagagacaacggggttgacagagtcacacacggtttgtggtatgtacagcgattacagaggtgacgacgcggaggggggttgggggtcacatttgtgtttctgtctgttccaggcgcttggctacacgcacccacgagggggagtgcctccgtgcacacacaccccacacacaggctccgcatccccacgcgcacgcacactctcgcacactctccatggctcatccacacacagacacgccc

SEQ ID NO: 13192 - DNA, 322 bp, Rattus norvegicus
  misc_feature (1)..(322): n=a, c, g or t
  ref <308>: DATABASE ACCESSION NUMBER: EMBL / AA875291
  ref <309>: DATABASE ENTRY DATE: 2000-03-03
cggccgagtgatgtggctgggaaggacaagtaccaggtcaacaacaagcacgacaaggagtacactccgctgcctctgaacaagatcatccagcgagctgaggagctggtggggcaggaggtgctgtacaggctgaccagtgagaactgtgagcacttcgtgaacgaactgcgttatggagtccctcggagtgaccaggtcagagatgccgtcaaggtggcgaccgtcactggagtgggcttggcggccttgggcctcattggagtcatgctctcaagaaacaaganacagaagcagtgagctgaatgactatccagcttta

SEQ ID NO: 13193 - protein, 160 aa, Rattus norvegicus
  ref <308>: DATABASE ACCESSION NUMBER: Refseq / NP_058756
  ref <309>: DATABASE ENTRY DATE: 2002-11-23
MPIPEPKPGDLIEIFRPMYSHWAIYVGDGYVIHLAPPSEIPGAGAASIMSALTDKAIVKKELLRDVAGKDKYQVNNKHDKEYTPLPLNKIIQRAEELVGQEVLYRLTSENCEHFVNELRYGVPRSDQVRDTVKVATVTGVGLAALGLIGVMLSRNKKQKQ

SEQ ID NO: 13194 - DNA, 1070 bp, Homo sapiens
  ref <308>: DATABASE ACCESSION NUMBER: Refseq / NM_007069
  ref <309>: DATABASE ENTRY DATE: 2002-11-05
gcgattgctggggctgcagcgctgcctccgagaccgagagtgggtggagcgggtcttcctggaagggtgcgataaggccgggcgaggtgcctgggatgcttctccccttccgcgaggaagagatctaattgggtagggcgggtgtagactagcctgccgagccgcccgctggcacctgcagcctcctgggcgcccgcgggcccggcgagaaagttgttaaagggagcgaggtggttgttcctggggtccgaggcgcgcctctcacgccctgcccaacagaagccgcagtcccgtggggtctggagacgcagtttccttgttaatgacaataaatccctgctccccctgcctcagacatctacgcagcgaaatcgagcctggccttgagggtccacaccgcgaggaagatgcgtgcgcccattccagagcctaagcctggagacctgattgagatttttcgccctttctacagacactgggccatctatgttggcgatggatatgtggttcatctggcccctccaagtgaggtcgcaggagctggtgcagccagtgtcatgtccgccctgactgacaaggccatcgtgaagaaggaattgctgtatgatgtggccgggagtgacaagtaccaggtcaacaacaaacatgatgacaagtactcgccgctgccctgcacgaaaatcatccagcgggcggaggagctggtggggcaggaggtgctctacaagctgaccagtgagaactgcgagcactttgtgaatgagctgcgctatggagtcgcccgcagtgaccaggtcagagatgtcatcatcgctgcaagcgttgcaggaatgggcttggcagccatgagccttattggagtcatgttctcaagaaacaagcgacaaaagcaataactgaaaaagactgtctgtcagcgatgactttatacatcaagggggtcttgttttgctagagagtttggggtttggtttgtggatttcattgtgatttataataaggcttattttcacagaataaaataaagcaaaacgagggaggattttattgggggagtgcagcccaaaaaa

SEQ ID NO: 13195 - protein, 162 aa, Homo sapiens
  ref <308>: DATABASE ACCESSION NUMBER: Refseq / NP_009000
  ref <309>: DATABASE ENTRY DATE: 2002-11-05
MRAPIPEPKPGDLIEIFRPFYRHWAIYVGDGYVVHLAPPSEVAGAGAASVMSALTDKAIVKKELLYDVAGSDKYQVNNKHDDKYSPLPCTKIIQRAEELVGQEVLYKLTSENCEHFVNELRYGVARSDQVRDVIIAASVAGMGLAAMSLIGVMFSRNKRQKQ

SEQ ID NO: 13196 - DNA, 580 bp, Rattus norvegicus
  ref <308>: DATABASE ACCESSION NUMBER: EMBL / AA875438
  ref <309>: DATABASE ENTRY DATE: 2000-03-03
tttttttttttttttttcagagtaaaaaaggagtttatatatttataaatgccaaataaataccagaggccacccaacgccctctcccagacaaggctgtctcccccagcccaaggcttctaaggtctgagacatcttggccccaagctacagcccaagagcagctgccagtctgagctacaagggaattgagtggggatgatctgtccagccaggagtcacgtggccctctgtgtgagggccccccatggtcacaggcctgtgtccctagatagggccctacagcggccaggctcagggggagaaggtggctatctccagggagacccgctgccacagctccttggtctgcttgctgcgcttgaggttctgcaggatgtcgttgaactgcatcacgcccatgggcgtcaggcagaaggcgctgcgggggctgcggatcgcattcacgaagtcgtcgtagtcggcaggggtcaggtgaattaagcggtggtggatgtactgcatgtacgcctgctgacagcgctgcaccagctggtggaaggccggggctcgaaggtggttgtgggccctcgtgccgaat

SEQ ID NO: 13197 - DNA, 471 bp, Rattus norvegicus; identical to SEQ ID NO: 5346
  ref <308>: DATABASE ACCESSION NUMBER: EMBL / AA875563
  ref <309>: DATABASE ENTRY DATE: 2000-03-03

SEQ ID NO: 13198 - protein, 325 aa, Rattus norvegicus; identical to SEQ ID NO: 5347
  ref <308>: DATABASE ACCESSION NUMBER: Refseq / NP_033063
  ref <309>: DATABASE ENTRY DATE: 2002-01-07

SEQ ID NO: 13199 - DNA, 384 bp, Rattus norvegicus
  ref <308>: DATABASE ACCESSION NUMBER: EMBL / AA875635
  ref <309>: DATABASE ENTRY DATE: 2000-03-03
tctttttttttttttttaatgagattacatttatttatgtgtatgtggaaggggcacatgtcaaggcacacacggaggtcagaggacaacttaccagagctggggctgtgtttccactgtgtgagccccgggaatggagctcaggtgtccagctttgctccttaaccgactgagctaactctccagcccctttgaagacttttacagcccacttctgccagctaccaaactagcaagtcttcagggatcttttttactttaattaaaattgtgaatttcaatgataattaaagttttagatttggatcactgggggttttgacactcagtaaataatccggtacgagggagaagtacgtgtctaagtcagcttattttaaaata

SEQ ID NO: 13200 - DNA, 401 bp, Rattus norvegicus; identical to SEQ ID NO: 5360
  ref <308>: DATABASE ACCESSION NUMBER: EMBL / AA891037
  ref <309>: DATABASE ENTRY DATE: 2000-03-03

SEQ ID NO: 13201 - protein, 402 aa, Rattus norvegicus; identical to SEQ ID NO: 5361
  ref <308>: DATABASE ACCESSION NUMBER: SWISS-Prot / R5RT3L
  ref <309>: DATABASE ENTRY DATE: 1994-06-01

SEQ ID NO: 13202 - DNA, 1548 bp, Homo sapiens; identical to SEQ ID NO: 5362
  ref <308>: DATABASE ACCESSION NUMBER: EMBL / U65581
  ref <309>: DATABASE ENTRY DATE: 2000-11-24

SEQ ID NO: 13203 - protein, 406 aa, Homo sapiens; identical to SEQ ID NO: 5363
  ref <308>: DATABASE ACCESSION NUMBER: SWISS-Prot / Q92901
  ref <309>: DATABASE ENTRY DATE: 2002-06-15

SEQ ID NO: 13204 - DNA, 559 bp, Rattus norvegicus
  ref <308>: DATABASE ACCESSION NUMBER: EMBL / AA891242
  ref <309>: DATABASE ENTRY DATE: 2000-03-03
cagttcaggcacagagtttattgaggtgaccccagtgtgtctctactcctctttctcatccccgtgggtgatgatgtagcagagagacttgtagtcgatgttgcctgtcaggtccatgggtgtcagggcgaacagctgctccacctcagcaggagagaacttgtctgcctgggtcatgagaagctgcttgaactcctccttgttcacaactccctggccgctcgggtcaaacattcggaaagcactcaggatggcctcctcagggtcggtcccattgagtttctccccgaagagcgtgaggaagacggtgaagttgatggggcccttcccctcttgcagcatggcatccagctcctcctctgggacacttaccctcccgagctgggaataagtctccttcaggtctgacttgcagatgattccgtctctgttctggtcaatgcagctgaaggcttccttgaattcctgaatctgggcttgctcgaacattgagaagacattggaagagccacgttgagcctgcttggtggctgcagccttgccccgggtcccagccttc

SEQ ID NO: 13205 - protein, 163 aa, Rattus norvegicus
  ref <308>: DATABASE ACCESSION NUMBER: SWISS-Prot / AAB31016
  ref <309>: DATABASE ENTRY DATE: 2003-02-01
AATKQAQRGSSNVFSMFEQAQIQEFKEAFSCIDQNRDGIICKSDLKETYSQLGRVSVPEEELDAMLQEGKGPINFTVFLTLFGEKLNGTDPEEAILSAFRMFDPSGQGVVNKEEFKQLLMTQADKFSPAEVEQLFTLTPMDLAGNIDYKSLCYIITHGDEKEE

SEQ ID NO: 13206 - DNA, 559 bp, Rattus norvegicus; identical to SEQ ID NO: 13204
  ref <308>: DATABASE ACCESSION NUMBER: EMBL / AA891242
  ref <309>: DATABASE ENTRY DATE: 2000-03-03

SEQ ID NO: 13207 - protein, 163 aa, Rattus norvegicus; identical to SEQ ID NO: 13205
  ref <308>: DATABASE ACCESSION NUMBER: SWISS-Prot / AAB31016
  ref <309>: DATABASE ENTRY DATE: 2003-02-01

SEQ ID NO: 13208 - DNA, 397 bp, Rattus norvegicus
  misc_feature (1)..(397): n=a, c, g or t
  ref <308>: DATABASE ACCESSION NUMBER: EMBL / AA891438
  ref <309>: DATABASE ENTRY DATE: 2000-03-03
ttccgtggtttggcttggatattggaggaaccctggtcaagctggtttattttgaacctaaagacatcactgctgaagaagaaaaggaggaagtggagagtctgaaaagcattcggaagtacctgacctccaatgtggcttatgggtcgacaggaattcgggacgtgcaccttgagctgaaggacctgactctgtgtggacgcaaaggcaatctgcactttatacgctttcccactcatgacatgcctgcttttattcaaatgggcagagataaaaacttctcaagtctccacactgtcttttgtgccactggaggtggatcatacaaatttgagcaggattttctcacaataggtgaccttcagcttcganaactggatgaactagattgcttaat

SEQ ID NO: 13209 - protein, 373 aa, Rattus norvegicus
  ref <308>: DATABASE ACCESSION NUMBER: SWISS-Prot / AAF23952
  ref <309>: DATABASE ENTRY DATE: 2003-02-01
MKLVNGRKQTFPWFGMDIGGTLVKLVYFEPKDITAEEEQEEVENLKSIRKYLTSNTAYGKTGIRDVHLELKNLTMCGRKGNLHFIRFPTCAMHLFIQMGSEKNFSSLHTTLCATGGGAFKFEEDFRMIADLQLHKLDELDCLIQGLLYVDSVGFNGKPECYYFENPTNPELCQKKPYCLDNPYPMLLVNMGSGVSILAVYSKDNYKRVTGTSLGGGTFLGLCCLLTGCETFEEALDMAAKGDSTNVDKLVKDIYGGDYERFGLQGSAVASSFGNMMSKEKRESISKEDLARATLVTITNNIGSIARMCALNENIDRVVFVGNFLRINMVSMKLLAYAMDFWSKGQLKALFLEHEGYFGAVGALLELFKMTDTQ

SEQ ID NO: 13210 - DNA, 5064 bp, Homo sapiens
ggactgccgcggaggaggcgagaaggaatccgacgctggggggcttgctcgggcggcagcgactgctgctgcggatgggagggggccggctcggcgcgcccatggagcgccacggcagggcttccgccacctccgtctcgtcggctggggagcaggcggccggggaccccgaagggcggcggcaggagccactgcggcgccgggcgagcagcgcgtcggtgcccgcggtcggggcctcggctgagggcacgaggcgggatcgactgggctcttacagcggccccacctcggtctcccgccagcgcgtcgaaagcctgaggaaaaagcggccgctttttccatggtttggactggatatcggtggaactctggtcaagctggtatattttgaacccaaagacatcactgctgaagaagaagaggaagaagtggaaagtcttaaaagcattcggaagtacctgacctccaatgtggcttatgggtctacaggcattcgggacgtgcacctcgagctgaaggacctgactctgtgtggacgcaaaggcaatctgcactttatacgctttcccactcatgacatgcctgcttttattcaaatgggcagagataaaaacttctcgagtctccacactgtcttttgtgccactggaggtggagcgtacaaatttgagcaggattttctcacaataggtgatcttcagctttgcaaactggatgaactagattgcttgatcaaaggaattttatacattgactcagtcggattcaatggacggtcacagtgctattactttgaaaaccctgctgattctgaaaagtgtcagaagttaccatttgatttgaaaaatccgtatcctctgcttctggtgaacattggctcaggggttagcatcttagcagtatattccaaagataattacaaacgggtcacaggtactagtcttggaggaggaactttttttggtctctgctgtcttcttactggctgtaccacttttgaagaagctcttgaaatggcatctcgtggagatagcaccaaagtggataaactagtacgagatatttatggaggggactatgagaggtttggactgccaggctgggctgtggcttcaagctttggaaacatgatgagcaaggagaagcgagaggctgtcagtaaagaggacctggccagagcgactttgatcaccatcaccaacaacattggctcaatagcaagaatgtgtgcccttaatgaaaacattaaccaggtggtatttgttggaaatttcttgagaattaatacgatcgccatgcggcttttggcatatgctttggattattggtccaaggggcagttgaaagcacttttttcggaacacgagggttattttggagctgttggagcactccttgagctgttgaagatcccgtgatcattacctggggaggggttcctgaaaccttccacaatgggatctgtggactttcatttttttaagagacttactcaatttcatgactgtactacctgaaacaaagtgagaaaggacaggtgtatttttctaagtcatcaagataaatccttaagaattcagtctaaattagcaaccaggaaggaaaaatatattaaaaacaacaaaaaagtggcacatgtccaggcagtgtgaggatttgctgtatataagttgcctgctttgtatttttgaaatctctgcatcactcattggaagtgcttctgaagagagctgctctgtgttcagttgactggttttgtgtcctgtttgaacttgctgaatgtaaggcaggctactatgcgttataatctaatcacaatttgtcaatatggtcttggcaatcatctgtgcattactctggtttgcattaagcctgtgtgtgaacttactgtaaaacatgttttatttcaaggttctgcaaaattaattgggcaggttaattgtgtacctgaaacttaacaagcagtttttggaagggcagttccacgttactttacactaaatcctgggaatgaatgtctggagagacagggcttcttttcttggcagaatttccttgggtagtgggcggactgttctgatgcaagtgggtacactggcagaagcagcacaatctggaggactaacatgagtcagcagggccactagaattgacaccccctcaggggatcagggagaatctggtttttctttcaggctaagtagaaaaggaagaactgaagtgtctgtcaaagaactcatggggagtggggggtccttcagggcactgtggcacttgggaggtgagtctcagaagactgcctgaggagagtgccaggctgcaggtgctcttggtaggggctgaagcttttctttctgctttgcagaataatttcaaaagcctttcccaaggagagaatgcaccttttatatctgaggtcttaagtggtgcccatattgctgttgaaggcaaggatgggcctgtacaaagcagccttggaccaggagggaaaaccccaaggctctgcagcctccctgctcccctccgtttaaggctgtggtcagggagggatgggcagggtgccagccgcatggaggcagcagagacacccgtgttccagctggggcaaggggaactgatatgtgggctgtgggctgttccactaggcgtggccacctctgcacatgggccttggcacttaggaaatatgggtgctgctgcattgggaccttgtgtgggtgcagagcaggatggctgctgcgtggagggtaattttgtcccctggagagtgattggtgaccctcttccctgctgctgctgtttgcaggctcctggcctatactacctctgacgccctgatcctgagttcctctgccctcctctgctgccagcagcgctgttggtggcctcaccctcctccagtacccaggcaccaaagatggcaccaccatcctcctgcttgtaccacagggtgctgctccctgggccaactcctgtgaacttgctcacttcccatggagaccgaggccagggcctgcccctctgaggcccctgttttgtggtcctgctgcctctgctgtgctgcgttcaggaggttgtccactgctcgacgtgggtcaccatgcagcccttgctgttcccacaatttaacagaaaaggaaactgaacggatgagtaaggctgcccagggtcactcagctggaaaagagtagagctggactcaaacccgggactgtctgtctctggtgcctgagttgggaagacgctgttgatgtccccttctgcctcgctttgagcttcctcctccgtgggccctccccctactctagagaaactagtccattccctcatgttccaccttgtgctcagtaaaccctgtcactccacagcagggtttttgagacagtctcgctgtgtcacccaggtggagtgcagtggggcgatctcagctcactgcaacctctgccttccaggctcaagcaattctcctgccttagcctcctgcgtagctgagactacaggcatgtgccaccatggctggctaatttttatatttttagtagagatggggtttcaccatgatggccaggctggtctcgaactccagaccccaggtgatccgcctgccttggcctcccaaagtgctgggaatacaggtgtgagcccctgcgcccggctcacagcagggttcttgataggccaccagtgaatcccatgccaccgaatctggcattcatttcacagcctcatctcagttctcactcagcagagccctcttgcctgtcctgccacccaggctactaatgttctggttcattctctgctgacagttagctgtggctgtcctcagcctcagtcctgggtctccccaagcagtcattagcatcaccttgactgatttccagggaacacttcaaccaccccttacctctgagctccagccccgagacactgccttctctctgcatttgttgatctctgtgcagcagtgcccacatcctcatcccagcttactgccgtctcaccaccttcaggttgtgaggtgcccataaactctgctgttaccattgccacttccctgtcttagcagctgtccctttcagtctgccctccactagtggccatgaagggggctgtgaccgtggtccaggtgagaaaggaaggcctgaactaagatgggaggtgggtggccagaatggagaggggagaagtggatggccagaatggagagatgcttagagggctgtgttgggaagtggtgactggatacaggggagggaggagagatacaagagggcacctgggctcatttgtggactacgtgattttgagactccaaataagcactgggtatttgggttggagatacagagctgagaatgatatgcatgtaggtgggcaaagcaagggggatttcatgagttctaaggtagggtgagaaaaataaccgagagttgagcagtgacggaggaagctgcaaagaaaacgactgctcagggagaggctggccaggggcctgtggctcaggggactgagaagaggagctctctaggcatctgaattgaggttgcccacaattggttgcaagatcgtggctggccttgatggaagctgggaagccactcggtcctagtgaggggtggtgaggagagcagcaacggccacacaggaaggctttggacgttttttctcctgacactagttatttccaggcctgggatatagctaggggcttggggtgggggcaactctttgcagggtggtgtggcctgtggaggaaacaggctcagttccactactttggccaggtgcaatggctcatgcctgtaatcccagcactttggaaggccaaggcgggtggatcacctgaggtcaggagttcaagaccagcctggacaacatggtgaaaccccgtctctactgaaaatacaaaaataattagccgggaatggtggtgcgtgcctgtaatcccaggtactcgagaggctgaggcagacagttgcttgaacctgggaggcagaggttgctgcagtgagccgagattgctgcactgcactccagcctgggtgacagcaagactgtctc

SEQ ID NO: 13211 - protein, 279 aa, Homo sapiens
MPAFIQMGRDKNFSSLHTVFCATGGGAYKFEQDFLTIGDLQLCKLDELDCLIKGILYIDSVGFNGRSQCYYFENPADSEKCQKLPFDLKNPYPLLLVNIGSGVSILAVYSKDNYKRVTGTSLGGGTFFGLCCLLTGCTTFEEALEMASRGDSTKVDKLVRDIYGGDYERFGLPGWAVASSFGNMMSKEKREAVSKEDLARATLITITNNIGSIARMCALNENINQVVFVGNFLRINTIAMRLLAYALDYWSKGQLKALFSEHEGYFGAVGALLELLKIP

SEQ ID NO: 13212 - DNA, 397 bp, Rattus norvegicus; identical to SEQ ID NO: 13208
  misc_feature (1)..(397): n=a, c, g or t
  ref <308>: DATABASE ACCESSION NUMBER: EMBL / AA891438
  ref <309>: DATABASE ENTRY DATE: 2000-03-03

SEQ ID NO: 13213 - protein, 373 aa, Rattus norvegicus; identical to SEQ ID NO: 13209
  ref <308>: DATABASE ACCESSION NUMBER: SWISS-Prot / AAF23952
  ref <309>: DATABASE ENTRY DATE: 2003-02-01

SEQ ID NO: 13214 - DNA, 5064 bp, Homo sapiens; identical to SEQ ID NO: 13210

SEQ ID NO: 13215 - protein, 279 aa, Homo sapiens; identical to SEQ ID NO: 13211

SEQ ID NO: 13216 - DNA, 499 bp, Rattus norvegicus; identical to SEQ ID NO: 5470
  ref <308>: DATABASE ACCESSION NUMBER: EMBL / AA891651
  ref <309>: DATABASE ENTRY DATE: 2000-03-03

SEQ ID NO: 13217 - DNA, 421 bp, Rattus norvegicus; identical to SEQ ID NO: 5486
  ref <308>: DATABASE ACCESSION NUMBER: EMBL / AA891689
  ref <309>: DATABASE ENTRY DATE: 2000-03-03

SEQ ID NO: 13218 - DNA, 764 bp, Homo sapiens
  ref <308>: DATABASE ACCESSION NUMBER: EMBL / AF161380
  ref <309>: DATABASE ENTRY DATE: 2001-05-31
atgaggcagaagagggctccttgtggacgttgctactcactagcttggatgggcacctgctggagccagatgctgagtacctccactggctgctaaccaacatcccgggtaaccgggtggctgaaggacaggtgacgtgtccctacctcccccccttccctgcccgaggctccggcatccaccgtcttgccttcctgctcttcaagcaggaccagccgattgacttctctgaggacgcacgcccctcaccctgctatcagctggcccagcggaccttccgcacttttgatttctacaagaaacaccaagaaaccatgactccagccggcttgtccttcttccagtgccgctgggatgactccgtcacctacatcttccaccagcttctggacatgcgggagccggtgtttgagttcgtgcggccgcccccttaccaccccaagcagaagcgcttcccccaccggcagcccctgcgctacctggaccggtacagggacagtcatgagcccacctatggcatctactaaggagccagagtgtgcgcatttcagagcatgggattgatcggcagcaagagtaaagacacagctccagaggcccacactgtggggtctgggccctgccttaggcagcccccctctttggccccctcccgtcaggcccagggcttggagtgaaagtgactctcaggtggtggggtggggaatgtgaataaacatgatttcttgccgggcaaaaaaaaaaaaaaagaaaaaaaaaaaaaa

SEQ ID NO: 13219 - protein, 174 aa, Homo sapiens; identical to SEQ ID NO: 5488
  ref <308>: DATABASE ACCESSION NUMBER: SWISS-Prot / AAF28940
  ref <309>: DATABASE ENTRY DATE: 2002-06-01

SEQ ID NO: 13220 - DNA, 418 bp, Rattus norvegicus; identical to SEQ ID NO: 5502
  ref <308>: DATABASE ACCESSION NUMBER: EMBL / AA891727
  ref <309>: DATABASE ENTRY DATE: 2000-03-03

SEQ ID NO: 13221 - DNA, 546 bp, Rattus norvegicus; identical to SEQ ID NO: 5578
  ref <308>: DATABASE ACCESSION NUMBER: EMBL / AA891828
  ref <309>: DATABASE ENTRY DATE: 2000-03-03

SEQ ID NO: 13222 - DNA, 1773 bp, Homo sapiens
  ref <308>: DATABASE ACCESSION NUMBER: EMBL / BC014026
  ref <309>: DATABASE ENTRY DATE: 2001-09-13
ggcacgaggggcggcgtgagttgcatgttgtgtgaggatcccggggccgccgcgtcgctcgggccccgccatggccgtcaccatcacgctcaaaacgctgcagcagcagaccttcaagatccgcatggagcctgacgagacggtgaaggtgctaaaggagaagatagaagctgagaagggtcgtgatgccttccccgtggctggacagaaactcatctatgccggcaagatcttgagtgacgatgtccctatcagggactatcgcatcgatgagaagaactttgtggtcgtcatggtgaccaagaccaaagccggccagggtacctcagcacccccagaggcctcacccacagctgccccagagtcctctacatccttcccgcctgcccccacctcaggcatgtcccatcccccacctgccgccagagaggacaagagcccatcagaggaatccgcccccacgacgtccccagagtctgtgtcaggctctgttccctcttcaggtagcagcgggcgagaggaagacgcggcctccacgctagtgacgggctctgagtatgagacgatgctgacggagatcatgtccatgggctatgagcgagagcgggtcgtggccgccctgagagccagctacaacaacccccaccgagccgtggagtatctgctcacgggaattcctgggagccccgagccggaacacggttctgtccaggagagccaggtatcggagcagccggccacggaagcagcaggagagaaccccctggagttcctgcgggaccagccccagttccagaacatgcggcaggtgattcagcagaaccctgcgctgctgcccgccctgctccagcagctgggccaggagaaccctcagcttttacagcaaatcagccggcaccaggagcagttcatccagatgctgaacgagccccctggggagctggcggacatctcagatgtggagggggaggtgggcgccataggagaggaggccccgcagatgaactacatccaggtgacgccgcaggagaaagaagctatagagaggttgaaggccctgggcttcccagagagcctggtcatccaggcctatttcgcgtgtgaaaaaaatgagaacttggctgccaacttcctcctgagtcagaactttgatgacgagtgatgccaggaagccaggccaccgaagcccccaccctacccttattccatgaaagttttataaaagaaaaaatatatatatattcatgtttatttaagaaatggaaaaaaaaatcaaaaatcttaaaaaaacaagcaaacagtccagcttcctgtcctcctaaagtggcccctgttcccatctcccgggccagacagctgtccccccgtcctcctccccagcccagcctgctcagagaagctggcaggactgggaggcgacagatgggcccctcttggcctctgtcccagctctctgcagccagacggaaaggcggctgcttgcctctccatcctccgaaaaacccctgaggacccccccccatcctcttctaggatgaggggaagctggagccccaactttgatcctccattggagtggcccaaatctttccatctagggcaagtcctgaaaggcccaaggccccctccccagtctggccttggcctccagcctggagaagggctaacatcagctcattgtcaaggccacccccaccccagaacagaaccgtgtctctgataaaggttttgaagtgaataaagttttaaaaactaaaaaaaaaaaaaaaaaaa

SEQ ID NO: 13223 - protein, 363 aa, Homo sapiens; identical to SEQ ID NO: 5581
  ref <308>: DATABASE ACCESSION NUMBER: SWISS-Prot / AAH14026
  ref <309>: DATABASE ENTRY DATE: 2002-06-15

SEQ ID NO: 13224 - DNA, 546 bp, Rattus norvegicus; identical to SEQ ID NO: 5578
  ref <308>: DATABASE ACCESSION NUMBER: EMBL / AA891828
  ref <309>: DATABASE ENTRY DATE: 2000-03-03

SEQ ID NO: 13225 - protein, 1372 aa, Rattus norvegicus; identical to SEQ ID NO: 5579
  ref <308>: DATABASE ACCESSION NUMBER: SWISS-Prot / AAD41775
  ref <309>: DATABASE ENTRY DATE: 2001-10-16

SEQ ID NO: 13226 - DNA, 501 bp, Rattus norvegicus; identical to SEQ ID NO: 5620
  ref <308>: DATABASE ACCESSION NUMBER: EMBL / AA891857
  ref <309>: DATABASE ENTRY DATE: 2000-03-03

SEQ ID NO: 13227 - protein, 100 aa, Rattus norvegicus; identical to SEQ ID NO: 913
  ref <308>: DATABASE ACCESSION NUMBER: SWISS-Prot / AAD40012
  ref <309>: DATABASE ENTRY DATE: 2001-10-16

SEQ ID NO: 13228 - DNA, 1469 bp, Homo sapiens
  misc_feature (1)..(1469): n=a, c, g or t
  ref <308>: DATABASE ACCESSION NUMBER: Refseq / NM_012192
  ref <309>: DATABASE ENTRY DATE: 2002-11-29
cggnggcggcaccgagaagctgaaacggaagtggcgtacggcatgcgccggttgggtgaatggagcggcagcagcagcagcaacagcaactgcgaaacctgcgtgacttcctgttggtctacaatcggatgacagaactctgcttccagcgctgtgtgcccagcttgcaccaccgagctctggacgctgaggaggaggcctgtctgcacagctgtgctgggaagctgatccattccaaccaccgcctcatggccgcttacgtgcagctcatgcctgccctggtacagcgccgcatcgcagactacgaggctgcctcggctgtgccaggcgttgctgctgaacagcctggggtctctccatcaggcagctagccatacccaaccccaggaaggaaggccttggatggaccctcagattgaaggacccggtggaccttggggttggtgaatcctaaacagagagaattcgaggttgcctgaaagctgggtgtccttgctccttttcctggagccaatatacccagtttttactcagtktgatttatattctggkcaaggaagcttkgcctactttattggnacaatccgkkgttctgtcgtttagtgnatatctgctggcttcagcctggcagctgagaaattgttttctatatgtagaaggaaancctgagnatkkgcaggcatctggttaaagcagggtctgtgtgtacaattttaaaacgggtaatatgtcatgctcttagntcatctncacaacnaaactatgagtaagcggtattagcctcacttaacagatgaggaagcaagattccagaaagtaccagaaggtcattttatacaacaggagattggttcctgcccagatgacagaaaatgggagctctgtctagttgtccttaagtctgactgacttcagtggctcataaccgtgagccaagtatttgttggttcataactgttgttttgtgaactatgtcttacatgtctagagttctgctggatctagggaaaggaggagctatcgaagtacaacggatcaaaaaaccacagggcttttggcactgcctccttgggaagttagtggccacagaagagagatgaaacctgtaagaagtctggagtcttttggaacttcagccatttccccaggttgttactttcttagtatgtacagtcttctcaggatgagcagtaaaacctttgaacaaaggtctgtgtggttgtcttcacgggcaatcaggaagggagagagctggggaccatattctgcaatgcagccaaatccgaggaagagaaactgaagggagaagtagatggcaatggttatgataaaaagggataaaactaaatcttcgggacttctttaatgctacgttaatgtttcactgctcgtctagaaactcctaaatccagctttctatcatctgccccacattggtccccttgagtacattctgtgatttctaattc

SEQ ID NO: 13229 - protein, 103 aa, Homo sapiens; identical to SEQ ID NO: 915
  ref <308>: DATABASE ACCESSION NUMBER: Refseq / NP_036324
  ref <309>: DATABASE ENTRY DATE: 2002-11-29

SEQ ID NO: 13230 - DNA, 550 bp, Rattus norvegicus; identical to SEQ ID NO: 5652
  ref <308>: DATABASE ACCESSION NUMBER: EMBL / AA891943
  ref <309>: DATABASE ENTRY DATE: 2000-03-03

SEQ ID NO: 13231 - DNA, 363 bp, Rattus norvegicus; identical to SEQ ID NO: 5664
  ref <308>: DATABASE ACCESSION NUMBER: EMBL / AA892012
  ref <309>: DATABASE ENTRY DATE: 2000-03-03

SEQ ID NO: 13232 - protein, 430 aa, Rattus norvegicus; identical to SEQ ID NO: 5665
  ref <308>: DATABASE ACCESSION NUMBER: SWISS-Prot / XNRTDM
  ref <309>: DATABASE ENTRY DATE: 1999-07-15

SEQ ID NO: 13233 - DNA, 2339 bp, Homo sapiens; identical to SEQ ID NO: 5666
  ref <308>: DATABASE ACCESSION NUMBER: EMBL / M22632
  ref <309>: DATABASE ENTRY DATE: 2000-03-04

SEQ ID NO: 13234 - protein, 430 aa, Homo sapiens; identical to SEQ ID NO: 5667
  ref <308>: DATABASE ACCESSION NUMBER: SWISS-Prot / XNHUDM
  ref <309>: DATABASE ENTRY DATE: 2002-06-15

SEQ ID NO: 13235 - DNA, 363 bp, Rattus norvegicus; identical to SEQ ID NO: 5664
  ref <308>: DATABASE ACCESSION NUMBER: EMBL / AA892012
  ref <309>: DATABASE ENTRY DATE: 2000-03-03

SEQ ID NO: 13236 - protein, 430 aa, Rattus norvegicus; identical to SEQ ID NO: 5665
  ref <308>: DATABASE ACCESSION NUMBER: SWISS-Prot / XNRTDM
  ref <309>: DATABASE ENTRY DATE: 1999-07-15

SEQ ID NO: 13237 - DNA, 2339 bp, Homo sapiens; identical to SEQ ID NO: 5666
  ref <308>: DATABASE ACCESSION NUMBER: EMBL / M22632
  ref <309>: DATABASE ENTRY DATE: 2000-03-04

SEQ ID NO: 13238 - protein, 430 aa, Homo sapiens; identical to SEQ ID NO: 5667
  ref <308>: DATABASE ACCESSION NUMBER: SWISS-Prot / XNHUDM
  ref <309>: DATABASE ENTRY DATE: 2002-06-15

SEQ ID NO: 13239 - DNA, 386 bp, Rattus norvegicus; identical to SEQ ID NO: 5681
  ref <308>: DATABASE ACCESSION NUMBER: EMBL / AA892154
  ref <309>: DATABASE ENTRY DATE: 1999-01-28

SEQ ID NO: 13240 - protein, 228 aa, Rattus norvegicus; identical to SEQ ID NO: 5682
  ref <308>: DATABASE ACCESSION NUMBER: Refseq / NP_037292
  ref <309>: DATABASE ENTRY DATE: 2002-11-14

SEQ ID NO: 13241 - DNA, 3773 bp, Homo sapiens; identical to SEQ ID NO: 5683
  ref <308>: DATABASE ACCESSION NUMBER: Refseq / NM_006454
  ref <309>: DATABASE ENTRY DATE: 2002-11-14

SEQ ID NO: 13242 - protein, 209 aa, Homo sapiens; identical to SEQ ID NO: 5684
  ref <308>: DATABASE ACCESSION NUMBER: Refseq / NP_006445
  ref <309>: DATABASE ENTRY DATE: 2002-11-14

SEQ ID NO: 13243 - DNA, 386 bp, Rattus norvegicus; identical to SEQ ID NO: 5681
  ref <308>: DATABASE ACCESSION NUMBER: EMBL / AA892154
  ref <309>: DATABASE ENTRY DATE: 1999-01-28

SEQ ID NO: 13244 - protein, 228 aa, Rattus norvegicus; identical to SEQ ID NO: 5682
  ref <308>: DATABASE ACCESSION NUMBER: Refseq / NP_037292
  ref <309>: DATABASE ENTRY DATE: 2002-11-14

SEQ ID NO: 13245 - DNA, 3773 bp, Homo sapiens; identical to SEQ ID NO: 5683
  ref <308>: DATABASE ACCESSION NUMBER: Refseq / NM_006454
  ref <309>: DATABASE ENTRY DATE: 2002-11-14

SEQ ID NO: 13246 - protein, 209 aa, Homo sapiens; identical to SEQ ID NO: 5684
  ref <308>: DATABASE ACCESSION NUMBER: Refseq / NP_006445
  ref <309>: DATABASE ENTRY DATE: 2002-11-14

SEQ ID NO: 13247 - DNA, 459 bp, Rattus norvegicus
  misc_feature (1)..(459): n=a, c, g or t
  ref <308>: DATABASE ACCESSION NUMBER: EMBL / AA892228
  ref <309>: DATABASE ENTRY DATE: 1999-01-28
cacaaaaagcagctggaaatcagaaaggcagctgccgctccagggtctcaaatccattaaaaccactacagaacaattaaaacaatccgagagaaaagggaaaggaaacaatgtccaacatttggcatttggttttatccacaggttttcccagagctcctcttggaattgaaagcaaactatattggcaaacacagcttctcagtacacaggaaggggcctcagcacctcctgccaacagaggcgctctgtgcagtcagactgtggggcacacagcagggtctctcatgctctggcctctttcatcccaccaccccttccaggacattaagcagcctacttacaggggtccccccacttggctgccatttcttcctagtaaggtggcctctgcatgcataatatattgggcaaactgtaggggacccaaagcagatactgagctggagtcncttcatc

SEQ ID NO: 13248 - protein, 504 aa, Rattus norvegicus
  ref <308>: DATABASE ACCESSION NUMBER: Refseq / NP_071568
  ref <309>: DATABASE ENTRY DATE: 2000-12-06
MVAPGSVRSRLGAVFPFLLVLVDLQYEGAECGVNADVEKHLELGKKLLAAGQLADALSQFHAAVDGDPDNYIAYYRRATVFLAMGKSKAALPDLTRVIELKMDFTAARLQRGHLLLKQGRLAEAEDDFKKVLKSNPSENEEKEAQSQLVKADEMQRLRAQALDAFDSADYTAAITFLDEILEVCVWDAELRELRAECFIKEGEPRKAISDLKAASKLKNDNTEAFYKISILYYQLGDHELSLSEVRECLKLDQDHKRCFAHYKQVKKLNKLIGSAEELIRDGRYTDATSKYESVMKAEPSVAEYTVRSKERVCHCFSKDEKPVEAIKICSEVLQLEPDNVNALKDRTEAYLIEEMYDEAIQDYEAAQEQNENDQQIREGLEKAQRLLKQSQKRDYYKILGVKRNAKKQEIIKAYRKLALQWHPDNFQSEEEKKKAEKKFIDIAAAKEVLSDPEMRRKFDDGEDPLDAETQQGGGSNPFHRSWDSWQGFNPFSSGGPFRFKFHFN

SEQ ID NO: 13249 - DNA, 2205 bp, Homo sapiens
  ref <308>: DATABASE ACCESSION NUMBER: Refseq / NM_006260
  ref <309>: DATABASE ENTRY DATE: 2002-10-22
aaattattcacaaaaagcagctggaaatcagaaaggcagctgccgctccagggtctcaaatccattaaaaccaccacagaacaattaaaacaatcagagagagaaaaggaaaaggaaacaacgtccaacatttggcatttggttttatccacaggttttcccagagctcctcttggaattgaaagcaaaatatattggcaaacactgcttctcaatacacaggaaggggagcctcagtgcctcctgccaacagaggcggctctgtgcagtcagactgtggggtgcacagcagtctctcaggctggggtttctggcctctttccatccaatcaccccttccaggaaattcagcagcctaccagacactgggcctctgcctggctgccctttcccccaggcagagcggccttgggcataataccaggcaacctgccagccccagagcagaaaccctgctgggatcccttccttcatcaaccttggtgtggaggatgctcaatagcgcttccacctccccctccccagcccctagctacatctctccacccttccctggacagtcctacttcccagctcacccacccaccagcagcttaagtctgggtgggatctatcatcagctcctccccctgtaacctcttccctccacagatccaccctgtgactcctcttcactcgcgagcctcggacatggtggcccccggctccgtgaccagccggctgggctcggtattccccttcctgctagtcctggtggatctgcagtacgaaggtgctgaatgtggagtaaatgcagatgttgagaaacatcttgaattgggcaagaaattacttgcagctggacagctagctgatgctttatctcagtttcatgctgccgtagatggtgaccctgataactatattgcttattatcggagggctactgtctttttagctatgggcaaatcaaaagctgcacttcctgatttaactaaagtgattcaattgaagatggacttcactgcagcaagattacagagaggtcacttattactcaaacaaggaaaacttgatgaagcagaagatgattttaaaaaagtgctcaaatctaatccaagtgaaaatgaagaaaaggaagcacagtctcaacttataaaatctgatgaaatgcagcgtttgcgttcacaagcacttaacgcttttggaagtggagattatactgctgctatagccttccttgataagattttagaggtttgtgtttgggatgcagaactacgggaacttcgagctgaatgttttataaaagaaggagaacctaggaaagctataagtgacttaaaagctgcgtcaaagttgaagaatgataatactgaagcgttttataaaataagcacactgtactaccaactaggagaccacgaactgtccctcagtgaagttcgggaatgtcttaaacttgaccaggatcataaaaggtgttttgcacactataaacaagtaaagaaacttaataagctgattgagtcagctgaagagctcatcagagatggcagatacacagatgctaccagcaaatatgaatctgtcatgaaaacagagccaagcattgctgaatatacagttcgttcaaaggagaggatttgccactgcttttctaaggacgagaagcctgttgaagctattagggtttgttctgaagttttacagatggaacctgacaatgtgaatgccctgaaagatcgagctgaggcctatttgatagaggaaatgtatgatgaagctattcaggattatgaaactgctcaggaacacaatgaaaatgatcagcagattcgagaaggtctagagaaagcacaaagattattgaaacagtcgcagaaacgagattattataaaatcttgggagtaaaaagaaatgccaaaaagcaagaaattattaaagcataccgaaaattagcactgcagtggcacccagataacttccagaatgaagaagaaaagaaaaaagctgagaaaaagttcattgatatagcagctgctaaagaagtcctctctgatccagaaatgagaaagaagtttgacgacggagaagatcctttggatgcagagagccagcaaggaggcggcggcaaccctttccacagaagctggaactcatggcaagggttcaatcccttcagctcaggcggaccatttagatttaaattccacttcaattaa

SEQ ID NO: 13250 - protein, 504 aa, Homo sapiens
  ref <308>: DATABASE ACCESSION NUMBER: Refseq / NP_006251
  ref <309>: DATABASE ENTRY DATE: 2002-10-22
MVAPGSVTSRLGSVFPFLLVLVDLQYEGAECGVNADVEKHLELGKKLLAAGQLADALSQFHAAVDGDPDNYIAYYRRATVFLAMGKSKAALPDLTKVIQLKMDFTAARLQRGHLLLKQGKLDEAEDDFKKVLKSNPSENEEKEAQSQLIKSDEMQRLRSQALNAFGSGDYTAAIAFLDKILEVCVWDAELRELRAECFIKEGEPRKAISDLKAASKLKNDNTEAFYKISTLYYQLGDHELSLSEVRECLKLDQDHKRCFAHYKQVKKLNKLIESAEELIRDGRYTDATSKYESVMKTEPSIAEYTVRSKERICHCFSKDEKPVEAIRVCSEVLQMEPDNVNALKDRAEAYLIEEMYDEAIQDYETAQEHNENDQQIREGLEKAQRLLKQSQKRDYYKILGVKRNAKKQEIIKAYRKLALQWHPDNFQNEEEKKKAEKKFIDIAAAKEVLSDPEMRKKFDDGEDPLDAESQQGGGGNPFHRSWNSWQGFNPFSSGGPFRFKFHFN

SEQ ID NO: 13251 - DNA, 459 bp, Rattus norvegicus; identical to SEQ ID NO: 13247
  misc_feature (1)..(459): n=a, c, g or t
  ref <308>: DATABASE ACCESSION NUMBER: EMBL / AA892228
  ref <309>: DATABASE ENTRY DATE: 1999-01-28

SEQ ID NO: 13252 - DNA, 2205 bp, Homo sapiens; identical to SEQ ID NO: 13249
  ref <308>: DATABASE ACCESSION NUMBER: Refseq / NM_006260
  ref <309>: DATABASE ENTRY DATE: 2002-10-22

SEQ ID NO: 13253 - protein, 504 aa, Homo sapiens; identical to SEQ ID NO: 13250
  ref <308>: DATABASE ACCESSION NUMBER: Refseq / NP_006251
  ref <309>: DATABASE ENTRY DATE: 2002-10-22

SEQ ID NO: 13254 - DNA, 474 bp, Rattus norvegicus
  ref <308>: DATABASE ACCESSION NUMBER: EMBL / AA892468
  ref <309>: DATABASE ENTRY DATE: 2000-03-03
gggctcctcaagatccaaaccagttgaaccagtttctaggacagcagcctagaggtggttactcattcctgggatcccctccccccaggtccaaagctcccttttgttctcatcccgtgaaggtgaaacctggcctgggcccagaggggcagccaggtgtaagcagacttggcccagaggtcctgctgacctctcattcctctttcctcccacagtggactctgtctgcctcaagtgggcacccccgaagcacaaacaagtcaagctctccaagaagtgaatggcctgtgcccttctttggatctgtgtttcctggcctctaacctgtaaatatgtgtacagacctgttttgtgtcatttattaataaagcaaattctgctggtgtgctggacttcggaggcaggaagaagtgctgaagggtgatattcttcatttcatttcacatccagccagttgtgttaaaaacatttcct

SEQ ID NO: 13255 - protein, 273 aa, Rattus norvegicus; identical to SEQ ID NO: 8824
  ref <308>: DATABASE ACCESSION NUMBER: SWISS-Prot / P27435
  ref <309>: DATABASE ENTRY DATE: 2001-10-16

SEQ ID NO: 13256 - DNA, 1834 bp, Homo sapiens
  ref <308>: DATABASE ACCESSION NUMBER: EMBL / L41351
  ref <309>: DATABASE ENTRY DATE: 1999-07-01
agacggtgctggtgactcgtccacactgctcgcttcggatactccaggcgtctcccgttgcggccgctccctgccttagaggccagccttggacacttgctgcccctttccagcccggattctgggatccttccctctgagccaacatctgggtcctgccttcgacaccaccccaaggcttcctaccttgcgtgcctggagtctgccccaggggcccttgtcctggccatggcccagaagggggtcctggggcctgggcagctgggggctgtggccattctgctctatcttggattactccggtcggggacaggagcggaaggggcagaagctccctgcggtgtggccccccaagcacgcatcacaggtggcagcagtgcagtcgccggtcagtggccctggcaggtcagcatcacctatgaaggcgtccatgtgtgtggtggctctctcgtgtctgagcagtgggtgctgtcagctgctcactgcttccccagcgagcaccacaaggaagcctatgaggtcaagctgggggcccaccagctagactcctactccgaggacgccaaggtcagcaccctgaaggacatcatcccccaccccagctacctccaggagggctcccagggcgacattgcactcctccaactcagcagacccatcaccttctcccgctacatccggcccatctgcctccctgcagccaacgcctccttccccaacggcctccactgcactgtcactggctggggtcatgtggccccctcagtgagcctcctgacgcccaagccactgcagcaactcgaggtgcctctgatcagtcgtgagacgtgtaactgcctgtacaacatcgacgccaagcctgaggagccgcactttgtccaagaggacatggtgtgtgctggctatgtggaggggggcaaggacgcctgccagggtgactctgggggcccactctcctgccctgtggagggtctctggtacctgacgggcattgtgagctggggagatgcctgtggggcccgcaacaggcctggtgtgtacactctggcctccagctatgcctcctggatccaaagcaaggtgacagaactccagcctcgtgtggtgccccaaacccaggagtcccagcccgacagcaacctctgtggcagccacctggccttcagctctgccccagcccagggcttgctgaggcccatccttttcctgcctctgggcctggctctgggcctcctctccccatggctcagcgagcactgagctggccctacttccaggatggatgcatcacactcaaggacaggagcctggtccttccctgatggcctttggacccagggcctgacttgagccactccttccttcaggactctgcgggaggctggggccccatcttgatctttgagcccattcttctgggtgtgctttttgggaccatcactgagagtcaggagttttactgcctgtagcaatggccagagcctctggcccctcacccaccatggaccagcccattggccgagctcctggggagctcctgggacccttggctatgaaaatgagccctggctcccacctgtttctggaagactgctcccggcccgcctgcccagactgatgagcacatctctctgccctctccctgtgttctgggctggggccacctttgtgcagcttcgaggacaggaaaggccccaatcttgcccactggccgctgagcgcccccgagccctgactcctggactccggaggactgagcccccaccggaactgggctggcgcttggatctggggtgggagtaacagggcagaaatgattaaaatgtttgagcac

SEQ ID NO: 13257 - protein, 343 aa, Homo sapiens
  ref <308>: DATABASE ACCESSION NUMBER: SWISS-Prot / Q16651
  ref <309>: DATABASE ENTRY DATE: 2002-06-15
MAQKGVLGPGQLGAVAILLYLGLLRSGTGAEGAEAPCGVAPQARITGGSSAVAGQWPWQVSITYEGVHVCGGSLVSEQWVLSAAHCFPSEHHKEAYEVKLGAHQLDSYSEDAKVSTLKDIIPHPSYLQEGSQGDIALLQLSRPITFSRYIRPICLPAANASFPNGLHCTVTGWGHVAPSVSLLTPKPLQQLEVPLISRETCNCLYNIDAKPEEPHFVQEDMVCAGYVEGGKDACQGDSGGPLSCPVEGLWYLTGIVSWGDACGARNRPGVYTLASSYASWIQSKVTELQPRVVPQTQESQPDSNLCGSHLAFSSAPAQGLLRPILFLPLGLALGLLSPWLSEH

SEQ ID NO: 13258 - DNA, 474 bp, Rattus norvegicus; identical to SEQ ID NO: 13254
  ref <308>: DATABASE ACCESSION NUMBER: EMBL / AA892468
  ref <309>: DATABASE ENTRY DATE: 2000-03-03

SEQ ID NO: 13259 - protein, 273 aa, Rattus norvegicus; identical to SEQ ID NO: 8824
  ref <308>: DATABASE ACCESSION NUMBER: SWISS-Prot / P27435
  ref <309>: DATABASE ENTRY DATE: 2001-10-16

SEQ ID NO: 13260 - DNA, 1834 bp, Homo sapiens; identical to SEQ ID NO: 13256
  ref <308>: DATABASE ACCESSION NUMBER: EMBL / L41351
  ref <309>: DATABASE ENTRY DATE: 1999-07-01

SEQ ID NO: 13261 - protein, 343 aa, Homo sapiens; identical to SEQ ID NO: 13257
  ref <308>: DATABASE ACCESSION NUMBER: SWISS-Prot / Q16651
  ref <309>: DATABASE ENTRY DATE: 2002-06-15

SEQ ID NO: 13262 - DNA, 112 bp, Rattus norvegicus
  ref <308>: DATABASE ACCESSION NUMBER: EMBL / AA892551
  ref <309>: DATABASE ENTRY DATE: 2000-03-03
ggaaacaaaaagtttttatttaaggcaaaaacatatcagccccattattagaaaaattatccttattggaaaaaatggccaagggccaaatctaggtattaattctttaaaa

SEQ ID NO: 13263 - DNA, 112 bp, Rattus norvegicus; identical to SEQ ID NO: 13262
  ref <308>: DATABASE ACCESSION NUMBER: EMBL / AA892551
  ref <309>: DATABASE ENTRY DATE: 2000-03-03

SEQ ID NO: 13264 - DNA, 478 bp, Rattus norvegicus; identical to SEQ ID NO: 5854
  misc_feature (1)..(478): n=a, c, g or t
  ref <308>: DATABASE ACCESSION NUMBER: EMBL / AA892635
  ref <309>: DATABASE ENTRY DATE: 2000-03-03

SEQ ID NO: 13265 - protein, 196 aa, Rattus norvegicus; identical to SEQ ID NO: 5855
  ref <308>: DATABASE ACCESSION NUMBER: SWISS-Prot / TVRTRH
  ref <309>: DATABASE ENTRY DATE: 2002-06-15

SEQ ID NO: 13266 - DNA, 642 bp, Homo sapiens
  ref <308>: DATABASE ACCESSION NUMBER: EMBL / M31470
  ref <309>: DATABASE ENTRY DATE: 1999-07-02
atgcccggagccggccgcagcagcatggctcacgggcccggcgcgctgatgctcaagtgcgtggtggtcggcgacggggcggtgggcaagacgtgcctactcatgagctatgccaacgacgccttcccggaggagtacgtgcccaccgtcttcgaccactacgcagtcagcgtcaccgtggggggcaagcagtacctcctaggactctatgacacggccggacaggaagactatgaccgtctgaggcctttatcttacccaatgaccgatgtcttccttatatgcttctcggtggtaaatccagcctcatttcaaaatgtgaaagaggagtgggtaccggaacttaaggaatacgcaccaaatgtaccctttttattaataggaactcagattgatctccgagatgaccccaaaactttagcaagactgaatgatatgaaagaaaaacctatatgtgtggaacaaggacagaaactagcaaaagagataggagcatgctgctatgtggaatgttcagctttaacccagaagggattgaagactgtttttgatgaggctatcatagccattttaactccaaagaaacacactgtaaaaaaaagaataggatcaagatgtataaactgttgtttaattacgtga

SEQ ID NO: 13267 - protein, 213 aa, Homo sapiens; identical to SEQ ID NO: 5857
  ref <308>: DATABASE ACCESSION NUMBER: SWISS-Prot / TVHUC4
  ref <309>: DATABASE ENTRY DATE: 2002-06-15

SEQ ID NO: 13268 - DNA, 478 bp, Rattus norvegicus; identical to SEQ ID NO: 5854
  misc_feature (1)..(478): n=a, c, g or t
  ref <308>: DATABASE ACCESSION NUMBER: EMBL / AA892635
  ref <309>: DATABASE ENTRY DATE: 2000-03-03

SEQ ID NO: 13269 - protein, 196 aa, Rattus norvegicus; identical to SEQ ID NO: 5855
  ref <308>: DATABASE ACCESSION NUMBER: SWISS-Prot / TVRTRH
  ref <309>: DATABASE ENTRY DATE: 2002-06-15

SEQ ID NO: 13270 - DNA, 642 bp, Homo sapiens; identical to SEQ ID NO: 13266
  ref <308>: DATABASE ACCESSION NUMBER: EMBL / M31470
  ref <309>: DATABASE ENTRY DATE: 1999-07-02

SEQ ID NO: 13271 - protein, 213 aa, Homo sapiens; identical to SEQ ID NO: 5857
  ref <308>: DATABASE ACCESSION NUMBER: SWISS-Prot / TVHUC4
  ref <309>: DATABASE ENTRY DATE: 2002-06-15

SEQ ID NO: 13272 - DNA, 499 bp, Rattus norvegicus; identical to SEQ ID NO: 5900
  ref <308>: DATABASE ACCESSION NUMBER: EMBL / AA892805
  ref <309>: DATABASE ENTRY DATE: 2000-03-03

SEQ ID NO: 13273 - DNA, 650 bp, Rattus norvegicus
  ref <308>: DATABASE ACCESSION NUMBER: EMBL / AA892817
  ref <309>: DATABASE ENTRY DATE: 2000-03-03
tgcggccgccaaacattttttttatttttttttttttttccagtccagtcccctacgctttattgggaaaccgtgtgttcaaaaaaacaggaggcgtgagggcctttctggagagatagcttaggggttacaggcacttgttctttctgagaacctgcgttggatttgcagcgccctcctctgtaattctggttccggaggatctgtcgccctcttctggccgtcgggggcactgcttgtgtgtggggcgtggacatacatgcagggaaaacacccatacacataaaataaaaatgttttttttaaaagagggggatgagctcagtggtggtggtggtggcggcggtggcgcacacctttaattcaagcacgtgggagtcggaggcaggtggagttcgaagccagcctggtctacggagctagttccagaccagccaagaagccctgtcttggaaaactaagataaaataaaaataaaaaagaggggggaagggctggagagatggctcagtggttaagagcattgactgctcttccaaatgacctgagttcaattcccagcaaccacatggtgactcacaaccatctataatgggatctgatgccctcttctggtgtgtctgaagacagctacagtatactcacataca

SEQ ID NO: 13274 - DNA, 532 bp, Rattus norvegicus
  ref <308>: DATABASE ACCESSION NUMBER: EMBL / AA892855
  ref <309>: DATABASE ENTRY DATE: 2000-03-03
ccacaaactttattgtagagtctgaatactagaaagagtcttcagtccgttggctgtcacttccctctcaccctcatctcttctcagccttggtggttttgaccgcaatggctgggcttcaggacactggagcttgtcacagtccagctctgattgctctaactcctgtaatcccaggaaccactctttccctgagcctgagtaaaggattctgagttctccatatttgtccatctttccccttcccaccctgacgaccccttcaggtttctaggcctcagctacaacttccttgggaggttcctcatctggtggggcctcctcaggtgctggcttgtgggcaagccctccctgtagccatgcagtttgcagtatgtctttcagcccactacacaggatggtgaggccaccggctattgccagtagccaggagaggagccaggtctcctgtgccaaacggctacggggttggaggggcagcaccacgggtagcaccggcgccatctcccatctctgcccaagggattgagga

SEQ ID NO: 13275 - protein, 351 aa, Rattus norvegicus
  ref <308>: DATABASE ACCESSION NUMBER: Refseq / NP_033099
  ref <309>: DATABASE ENTRY DATE: 2002-01-07
MAPVLPVVLPLQPRIRLAQGIWLLSWLLALVGGLTLLCSGHLLVQLGHLGTFLAPSCSFPALPQTALAAGTVALGTGLGGAGASRASLDAAQYPPWRGVLTPLLAVGTAAGGGLLTLALGLALALPVSLNQGLEEGLEAALAHYKDTEVPGRCQAKRLMDELQLRYHCCGRHGYKDWFGVQWVSNRYLDPSDQDVVDRIQSNVEGLYLIDGVPFSCCNPHSPRPCLQSQLSDPYAHPLFDPRQPNLNLWAQGCHEVLLEHLQGLSGTLGSILAVTLLLQILVLLGLRYLQTALEGLGGVIDGEGEAQGYLFPGGLKDILKTAWLQGGLAHKPAPEEAPPDEEPPKEVLAEA

SEQ ID NO: 13276 - DNA, 533 bp, Rattus norvegicus; identical to SEQ ID NO: 5986
  misc_feature (1)..(533): n=a, c, g or t
  ref <308>: DATABASE ACCESSION NUMBER: EMBL / AA892888
  ref <309>: DATABASE ENTRY DATE: 2000-03-03

SEQ ID NO: 13277 - DNA, 574 bp, Rattus norvegicus; identical to SEQ ID NO: 5995
  ref <308>: DATABASE ACCESSION NUMBER: EMBL / AA892919
  ref <309>: DATABASE ENTRY DATE: 2000-03-03

SEQ ID NO: 13278 - protein, 704 aa, Rattus norvegicus; identical to SEQ ID NO: 5996
  ref <308>: DATABASE ACCESSION NUMBER: SWISS-Prot / AAA41719
  ref <309>: DATABASE ENTRY DATE: 2002-06-15

SEQ ID NO: 13279 - DNA, 574 bp, Rattus norvegicus; identical to SEQ ID NO: 5995
  ref <308>: DATABASE ACCESSION NUMBER: EMBL / AA892919
  ref <309>: DATABASE ENTRY DATE: 2000-03-03

SEQ ID NO: 13280 - protein, 704 aa, Rattus norvegicus; identical to SEQ ID NO: 5996
  ref <308>: DATABASE ACCESSION NUMBER: SWISS-Prot / AAA41719
  ref <309>: DATABASE ENTRY DATE: 2002-06-15

SEQ ID NO: 13281 - DNA, 511 bp, Rattus norvegicus
  ref <308>: DATABASE ACCESSION NUMBER: EMBL / AA892942
  ref <309>: DATABASE ENTRY DATE: 2000-03-03
acactctaataaagaccctgatttaataaagaagacatttaaaatgtgccaacaatagacaaatgtatttacaacataatctaaagattccaacaaaattttcagtagctacaaaagaattcagctgcctataatagttcacatttggtttagtctatagtatatcactgtcttaggaaataaccttaatacaaatgtaatttataatatcccctttataacaagaaaaaaataaattcatacagtattttataggcatttattatgccaagtacttaagcaattactctcattattacataagaataatattcttattaaaaggtaatctttccagagtgatctatggccacaaaagacacagcaacagcggcctgtccatccaccacagctacaaagatccatttatatcaaacagctcgagtgaaatgacttactactaagaaaaaacaaaattttagaaatcagttaacactagtacccagtttagcttttacgtgcttatacaagt

SEQ ID NO: 13282 - DNA, 428 bp, Rattus norvegicus
  ref <308>: DATABASE ACCESSION NUMBER: EMBL / AA893158
  ref <309>: DATABASE ENTRY DATE: 2000-03-03
aaagtcatgagaccagactgtttaaacatttatcttaaaatcaaagctcagactatagcttttcacttttctattctaataaaccaaacagaggacctgggttccgatgccagcactgagtggctagtttacaagcatctataatctccatttcagggtttccaaaacctctcctggcctcctcaggaaaataggcatgcaagtggttgggtgcatgtgcatgtacgcaggcaaacactcgtacacataaaatctgttgttaaaagacagaaaacggaggcttttataagtaattttccttgtggcaattaaatgtaaaatggtgcttgcctttttcctcattcactggaactgggtaggaacacagaagtaatcaggttactcaaagacctgggctatggggggggaaaagaaggaggaatggagag

SEQ ID NO: 13283 - protein, 463 aa, Rattus norvegicus
  ref <308>: DATABASE ACCESSION NUMBER: SWISS-Prot / AAA37238
  ref <309>: DATABASE ENTRY DATE: 2002-06-15
MSYPGYPPTGYPPFPGYPPAGQESSFPTAGQYPYPSGFPPMGGGAYPPAPSGGYPGAGGYPAPGGYPAPGGYPGALSPGGPPAYPGGQGFGAPPGGAGFSGYPQPPAQSYGGGPAQVPVPGGFPGGQMPSQYPGGQAPYPSQPASMTQGTQGTILPASNFDAMRDAEILRKAMKGFGTDEQAIVDVVSNRSNDQRQQIKAAFKTMYGKDLIKDLKSELSGNMEELILALFMPSTYYDAWSLRKAMQGAGTQERVLIEILCTRTNQEIRDIVRCYQLEFGRDLEKDIRSDTSGHFERLLVSMCQANRDERQSVNHQMAQEDAQRLYQAGEGRLGTDESCFNMILATRSFPQLKATMEAYSRMANRDLLSSVSREFSGYVESGLKTILQCALNRPAFFAERLYYSMKGAGTDDSTLVRIVVTRSEIDLVQIKQMFTQMYQKTLSTMIASDTSGDYRKLLLAIVGQ

SEQ ID NO: 13284 - DNA, 2110 bp, Homo sapiens
  ref <308>: DATABASE ACCESSION NUMBER: Refseq / NM_001156
  ref <309>: DATABASE ENTRY DATE: 2001-02-03
gaacccggtctcccgcaagatggagccgggttgggctgtgacgctgctgctggggtcagaatgtcatacccaggctatcccccaacaggctacccacctttccctggatatcctcctgcaggtcaggagtcatcttttcccccttctggtcagtatccttatcctagtggctttcctccaatgggaggaggtgcctacccacaagtgccaagtagtggctacccaggagctggaggctaccctgcgcctggaggttatccagcccctggaggctatcctggtgccccacagccagggggagctccatcctatcccggagttcctccaggccaaggatttggagtcccaccaggtggagcaggcttttctgggtatccacagccaccttcacagtcttatggaggtggtccagcacaggttccactacctggtggctttcctggaggacagatgccttctcagtatcctggaggacaacctacttaccctagtcagcctgccacagtgactcaggtcactcaaggaactatccgaccagctgccaacttcgatgctataagagatgcagaaattcttcgtaaggcaatgaagggttttgggacagatgagcaggcaattgtggatgtggtggccaaccgttccaatgatcagaggcaaaaaattaaagcagcatttaagacctcctatggcaaggatttaatcaaagatctcaaatcagagttaagtggaaatatggaagaactgatcctggccctcttcatgcctcctacgtattacgatgcctggagcttacggaaagcaatgcagggagcaggaactcaggaacgtgtattgattgagattttgtgcacaagaacaaatcaggaaatccgagaaattgtcagatgttatcagtcagaatttggacgagaccttgaaaaggacattaggtcagatacatcaggacattttgaacgtttacttgtgtccatgtgccagggaaatcgtgatgagaaccagagtataaaccaccaaatggctcaggaagatgctcagcgtctctatcaagctggtgaggggagactagggaccgatgaatcttgctttaacatgatccttgccacaagaagctttcctcagctgagagctaccatggaggcttattctaggatggctaatcgagacttgttaagcagtgtgagccgtgagttttccggatatgtagaaagtggtttgaagaccatcttgcagtgtgccctgaaccgccctgccttctttgctgagaggctctactatgctatgaaaggtgctggcacagatgactccaccctggtccggattgtggtcactcgaagtgagattgaccttgtacaaataaaacagatgttcgctcagatgtatcagaagactctgggcacaatgattgcaggtgacacgagtggagattaccgaagacttcttctggctattgtgggccagtaggagggatttttttttttttaatgaaaaaaaaatttctattcatagcttatccttcagagcaatgacctgcatgcagcaatatcaaacatcagctaaccgaaagagctttctgtcaaggaccgtatcagggtaatgtgcttggtttgcacatgttgttattgccttaattctaattttattttgttctctacatacaatcaatgtaaagccatatcacaatgatacagtaatattgcaatgtttgtaaaccttcattcttactagtttcattctaatcaagatgtcaaattgaataaaaatcacagcaatctctgattctgtgtaataatattgaataattttttagaaggttactgaaagctctgccttccggaatccctctaagtctgcttgatagagtggatagtatgttaaaactgtgtactttaaaaaaaaattcaacctttacatctagaataatttgcatctcattttgcctaaattggttctgtattcataaacactttccacatagaaaatagattagtattacctgtggcaccttttaagaaagggtcaaatgtttatatgcttaagatacatagcctccctttttttcgcgttgtttcctttttttaaattgagttatgacaaataaaaaattgcatat

SEQ ID NO: 13285 - protein, 466 aa, Homo sapiens
  ref <308>: DATABASE ACCESSION NUMBER: Refseq / NP_001147
  ref <309>: DATABASE ENTRY DATE: 2001-02-03
MSYPGYPPTGYPPFPGYPPAGQESSFPPSGQYPYPSGFPPMGGGAYPQVPSSGYPGAGGYPAPGGYPAPGGYPGAPQPGGAPSYPGVPPGQGFGVPPGGAGFSGYPQPPSQSYGGGPAQVPLPGGFPGGQMPSQYPGGQPTYPSQPATVTQVTQGTIRPAANFDAIRDAEILRKAMKGFGTDEQAIVDVVANRSNDQRQKIKAAFKTSYGKDLIKDLKSELSGNMEELILALFMPPTYYDAWSLRKAMQGAGTQERVLIEILCTRTNQEIREIVRCYQSEFGRDLEKDIRSDTSGHFERLLVSMCQGNRDENQSINHQMAQEDAQRLYQAGEGRLGTDESCFNMILATRSFPQLRATMEAYSRMANRDLLSSVSREFSGYVESGLKTILQCALNRPAFFAERLYYAMKGAGTDDSTLVRIVVTRSEIDLVQIKQMFAQMYQKTLGTMIAGDTSGDYRRLLLAIVGQ

SEQ ID NO: 13286 - DNA, 654 bp, Rattus norvegicus
  ref <308>: DATABASE ACCESSION NUMBER: EMBL / AA893191
  ref <309>: DATABASE ENTRY DATE: 2000-03-03
ggtacaaagtttataacacacctttccctgaaacagtagcttgaagtgttttgaaacagatggggatggcagatccaggacttccaatgcctggctacacatttggtccatatggacaaagtggggacaggatacgacatcaatcctgagggaggggcttggaggcctcaggcagtaatcttatgcaggcttgagaaaaagattcagaccaaaagctacacgtgaccttccaggcaacccagactcctaggcagcccaagggttggcagccatcttcacacttgtgatccttgcccaaggccaaggccaaggccaaccgccccactcaggcaaacaaggtattcactccctgagggccatcaaggagggtgctgacttcatgaacagtctcggaccaaccattcctggggccatgctgggatggcattcctcgaaaacccattggtgatgggacatggcgccctcagagcaggaccgcatctttggaggccatggagtcaaggaacaatgaggacgggccctgcccacactcagagccagacaggcaccaagaccctggtccacagtcaccagcaggaccctagggcagctccaaagccagcagtgcctgatcagggacaaggggccaacacgtgactggcccacaagtggctt

SEQ ID NO: 13287 - DNA, 654 bp, Rattus norvegicus; identical to SEQ ID NO: 13286
  ref <308>: DATABASE ACCESSION NUMBER: EMBL / AA893191
  ref <309>: DATABASE ENTRY DATE: 2000-03-03

SEQ ID NO: 13288 - DNA, 608 bp, Rattus norvegicus
  ref <308>: DATABASE ACCESSION NUMBER: EMBL / AA893210
  ref <309>: DATABASE ENTRY DATE: 2000-03-03
caaaagattttatgaggggtggtttaatgacaatatgaaaaaagcacaagtgtctgtttcagttaaaactctgccctgaagatgaaggggctatgttcctccttgtttacgtgtgcagagcaaggattgccacagttctggtcagggtggtgactgatttgtatgtgccatcataatctcttactggagtaaatggcaaactttagtcatccagaatatcttcatccagattgatgtctgttgtatcaatatcctctaattccatggtatctaaatcatcttctagttcctggaaactcttttcttctttgtgagtggtttgggaggccatgataactgggctagaagctggtttcccatcaggttcctgctgagctgtggctcttgagggctgaaagccttttgcctcttccataacatttctctcttcatttggcgtgacaagagggtactgcttggctggccacagatccgcatgtgtctccttcacccattcttcaacaacaaaggcttcttttaatccagggaaaaggttttcatactctgtggggtcagcgagggattctgctgctttctggttgacttttgagagattctccctccacaac

SEQ ID NO: 13289 - protein, 904 aa, Rattus norvegicus
  ref <308>: DATABASE ACCESSION NUMBER: SWISS-Prot / O35142
  ref <309>: DATABASE ENTRY DATE: 2001-10-16
PLRLDIKRKLTAMSDRVKSVDLHPTEPWMLASLYNGSVCVWNHETQTLVKTFEVCDLPVRAAKFVARKNWVVTGADDMQIRVFNYNTLERVHMFEAHSDYIRCIAVHPTQPFILTSSDDMLIKLWDWDKKWSCSQVFEGHTHYVMQIVINPKDNNQFASASLDRTIKVWQLGSSSPNFTLEGHEKGVNCIDYYSGGDKPYLISGADDRLVKIWDYQNKTCVQTPEGHAQNVSCATFHPELPIIITGSEDGTVRIWHSSTYRLESTLNYGMERVWCVASLRGSNNVALGYDEGSIIVKLGREEPAMSMDANGKIIWAKHSEVQQANLKAMGDTEIKDGERLPLAVKDMGSCEIYPQTIQHNPNGRFVVVCGDGEYIIYTAMALRNKSFGSAQEFAWAHDSSEYAIRESNSVVKIFKNFKEKKSFKPDFGAESIYGGFLLGVRSVNGLAFYDWENTELIRRIEIQPKHIFWSDSGELVCIATEESFFILKYLSEKVLAAQETHEGVTEDGIEDAFEVLGEIQEIVKTGLWVGDCFIYTSSVNRLNYYVGGEIVTIAHLDRTMYLLGYIPKDNRLYLGDKELNIVSYSLLVSVLEYQTAVMRRDFSMADKVLPTIPKEQRTRVAHFLEKQGFKQQALTVSTDPEHRFELALQLGELKIAYQLAVEAESEQKWKQLAELAISKCQFSLAQECLHHAQDYGGLLLLATASGNASMVNKLAEGAERDGKNNVAFMSYFLQGKLDACLELLIRTGRLPEAAFLARTYLPSQVSRVVKLWRENLSKVNQKAAESLADPTEYENLFPGLKEAFVVEEWVKETHADLWPAKQYPLVTPNEERNVMEEAKRFQPSRATAQQEPDGKPASSPVIMASQTTHKEEKSFQELEDDLDTMELEDIDTTDINLDEDILDD

SEQ ID NO: 13290 - DNA, 3067 bp, Homo sapiens
  ref <308>: DATABASE ACCESSION NUMBER: EMBL / X70476
  ref <309>: DATABASE ENTRY DATE: 1993-08-24
ggtgggtttatctcaaggcctgagtagccggtaacaaacgagggttcccgggattggaccgacgcaccatgcctctgcgacttgatatcaaaagaaagctaactgctagatctgatcgagttaagagtgtggatctgcatcctacagagccatggatgttggcaagtctttacaatggcagtgtgtgtgtttggaatcatgaaacacagacactggtgaagacatttgaagtatgtgatcttcctgttcgagctgcaaagtttgttgcaaggaagaattgggttgtgacaggagcggatgacatgcagattagagtgttcaattacaatactctggagagagttcatatgtttgaagcacactcagactacattcgctgtattgctgttcatccaacccagcctttcattctaactagcagtgatgacatgcttattaagctctgggactgggataaaaaatggtcttgctcacaagtgtttgaaggacacacccattatgttatgcagattgtgatcaaccccaaagataacaatcagtttgccagtgcctctttggacaggactatcaaggtgtggcagttgggctcttcgtcaccaaacttcactttggaaggacatgagaaaggcgtgaattgcattgattactacagtggtggggacaagccatacctcatttcaggtgcagatgaccgtcttgttaaaatatgggattatcagaataaaacatgtgtgcagacactggaaggacatgcccaaaatgtgtcttgtgccagctttcatcctgagttgccaatcattatcacaggttcagaagatggaacagtacgtatttggcattcaagcacctaccggcttgagagcacactgaattatggaatggagagggtatggtgcgtggccagtctaagagggtcaaacaatgtcgctttgggctatgatgaagggagcatcattgttaagcttggtcgggaggaacctgccatgtccatggatgccaatggaaagataatttgggccaagcattcagaagtccagcaggccaacctaaaagcaatgggagatgctgaaattaaagatggtgaaagattgccactggcagtaaaggatatgggcagttgtgaaatataccctcagactattcagcacaatcctaatgggcggtttgtggtggtgtgtggtgatggggagtatatcatctacacagcaatggcattgagaaacaagagctttggatctgctcaggagtttgcatgggcccacgattcttcagagtatgcaataagagagagcaacagcattgtaaagatatttaagaactttaaggaaaaaaaatcatttaaaccagattttggagcagaaagtatctacggcggcttcttattgggagtcagatctgtaaatggcttagccttctatgactgggacaatacagaactcatacgaagaattgaaattcagcccaaacatattttctggtctgactctggagagctagtctgtattgctactgaggaatcattttttatccttaagtatctgtcagaaaaagtcttggctgcacaggaaacacatgagggagttactgaagatggcattgaagatgcctttgaggttcttggtgagattcaggaaattgtgaaaacagggctttgggtaggcgattgcttcatttacacaagttctgtgaacagattaaattattatgttggaggagaaatagtcaccattgcccacttggacaggacgatgtatctcctaggctacattcctaaagacaacaggctttatctgggggataaagaattgaacatcattagctattccctgctggtttcagtcctggaataccagacagctgtcatgcggagggactttagcatggctgataaggtccttcctaccattccaaaagaacagaggaccagagttgcacactttttggaaaagcagggcttcaagcagcaagctcttacagtatccacagatcctgagcatcgttttgagcttgctcttcagcttggagagttaaaaattgcataccagttagcagtggaagcagagtcagaacagaagtggaaacaacttgctgaacttgccattagtaaatgtcagtttggcctagcccaggagtgcctgcatcatgcacaggattatgggggcctgctgcttttggccactgcctctggaaatgctaatatggtgaacaagctagcagagggtgcggagagagatggcaaaaataatgtggcattcatgagctactttttacagggcaaggttgatgcctgcctagagctcttaattagaactggacggctgccagaagctgccttcttggcccgaacttacttacccagtcaggtttcaagggtagtgaaactctggagagagaatctctcaaaagtcaatcagaaagcagcagaatcccttgctgacccaacagagtatgaaaacctgttccctggattaaaagaagcctttgttgttgaagaatgggtgaaggaaacacatgctgatctgtggccagccaaacaatacccacttgtcacgccaaatgaagagagaaatgtcatggaagagggaaaagactttcagccctcaagatctacagctcaacaggaacttgatgggaaacctgcttctcctactccggttattgtggcctcccacacagccaacaaagaagaaaagagtttactcgaactagaagtagatttggataatttggaattagaagatattgacacaacagatatcaatctggatgaagatattttggatgattgactgtaatgctttccatttacctgactaaacagatcattattatatataggtattgattgctaccctgaccacagtgctttggactatgagaaacttcttagatttttatatgtaaatgctgtggaccactgggagcacaatgcccacatcatcttaagaagagtttatgtgcagcatttaaatcactgtgttttccttgttaactaaaacagacatgggctttgatttttttcatactattagaccatatctcataaaaccttttgaattaaaaaaaa

SEQ ID NO: 13291 - protein, 905 aa, Homo sapiens
  ref <308>: DATABASE ACCESSION NUMBER: SWISS-Prot / P35606
  ref <309>: DATABASE ENTRY DATE: 2002-06-15
PLRLDIKRKLTARSDRVKSVDLHPTEPWMLASLYNGSVCVWNHETQTLVKTFEVCDLPVRAAKFVARKNWVVTGADDMQIRVFNYNTLERVHMFEAHSDYIRCIAVHPTQPFILTSSDDMLIKLWDWDKKWSCSQVFEGHTHYVMQIVINPKDNNQFASASLDRTIKVWQLGSSSPNFTLEGHEKGVNCIDYYSGGDKPYLISGADDRLVKIWDYQNKTCVQTLEGHAQNVSCASFHPELPIIITGSEDGTVRIWHSSTYRLESTLNYGMERVWCVASLRGSNNVALGYDEGSIIVKLGREEPAMSMDANGKIIWAKHSEVQQANLKAMGDAEIKDGERLPLAVKDMGSCEIYPQTIQHNPNGRFVVVCGDGEYIIYTAMALRNKSFGSAQEFAWAHDSSEYAIRESNSIVKIFKNFKEKKSFKPDFGAESIYGGFLLGVRSVNGLAFYDWDNTELIRRIEIQPKHIFWSDSGELVCIATEESFFILKYLSEKVLAAQETHEGVTEDGIEDAFEVLGEIQEIVKTGLWVGDCFIYTSSVNRLNYYVGGEIVTIAHLDRTMYLLGYIPKDNRLYLGDKELNIISYSLLVSVLEYQTAVMRRDFSMADKVLPTIPKEQRTRVAHFLEKQGFKQQALTVSTDPEHRFELALQLGELKIAYQLAVEAESEQKWKQLAELAISKCQFGLAQECLHHAQDYGGLLLLATASGNANMVNKLAEGAERDGKNNVAFMSYFLQGKVDACLELLIRTGRLPEAAFLARTYLPSQVSRVVKLWRENLSKVNQKAAESLADPTEYENLFPGLKEAFVVEEWVKETHADLWPAKQYPLVTPNEERNVMEEGKDFQPSRSTAQQELDGKPASPTPVIVASHTANKEEKSLLELEVDLDNLELEDIDTTDINLDEDILDD

SEQ ID NO: 13292 - DNA, 638 bp, Rattus norvegicus
  ref <308>: DATABASE ACCESSION NUMBER: EMBL / AA893212
  ref <309>: DATABASE ENTRY DATE: 2000-03-03
gagctgggaaccgaacccagggccttgtgcttgctaggcaagtgctctaccactgagccaaatccccaacccctgtagtgcgccttctatactagaaagcttgaccactgagccacacctcccactagtgcttcaatgtcaaccgagagtaaaatgtgtttgtatgaaatgcctccatttgactagatagagctttatttggagaaagtcacatataacataattgaactttgaattatacaatcccgtggattttagagtgctcctggagcaggtggcagtcaccactatctacttccagaacagtctcatcctttccagaaacccacactctgtctttcctctattccagatctgttagacgagtggaattacatagtccggtcttttctgagttctgttactaagttttaaaggtttattctcaggtagcatcagtccgtaatgtattactgctgaatagtgttccgtgtatacagacaccgtgtgtgtcttcttccagcgagcagaggaactctgagctgtttctactttggggcttttgactaatgctatgaacatctgtgaaaaagttcgaaatgtttgatttagtacagaccctagtggggagctccggggtcatattatgacagcctcaa

SEQ ID NO: 13293 - DNA, 505 bp, Rattus norvegicus
  misc_feature (1)..(505): n=a, c, g or t
  ref <308>: DATABASE ACCESSION NUMBER: EMBL / AA893275
  ref <309>: DATABASE ENTRY DATE: 2000-03-03
cagcgcaggccgcacaggccgaggcagccgagtcgtggtatctggctctcctgggtttcgccgagcacttccgaacatctagcccgcccaagatccgcttgtgcgttcattgcctgcaggccgtgttccccttcaaaccgcctcagcggatagaggcccgtacgcacctgcagctcggctcggtgctttaccaccacacgaagaacagcgaacaggcgcgcagtcacttagagaaggcgtggttgatatcacagcaaatcccgcagtttgaagatgttaaatttgaggcagcgagcctgttgtcagagctgtattgtcaagagaactctgtggacgcagcgaagccgctgctgcggaaagccatccagatctcacagcagacgccatactggcactgccgcttgctcttccagctcgctcaactgcacacattggagaaggatctggtatctgcctgtgnactcctgngtgtggnggccgagtatgcccgagtggtgggatctga

SEQ ID NO: 13294 - DNA, 4164 bp, Homo sapiens
  ref <308>: DATABASE ACCESSION NUMBER: Refseq / XM_048457
  ref <309>: DATABASE ENTRY DATE: 2002-08-01
gcggcttgttgttgtggaggccaaaatggcggctcaggcggcggcagcggcccaggcggcggcggcccaggctgcgcaggccgaggcggccgactcgtggtacctggcgcttctgggcttcgctgagcacttccgcacttccagcccgcccaaaatccgcctgtgcgtgcactgcctgcaggccgtgttccccttcaagccgccgcagcgcatcgaggcccgtacacacctgcagctgggctccgttctctatcaccacaccaagaacagcgagcaggcgcgcagccacctggagaaggcgtggttgatatcacagcaaatcccgcagttcgaagatgttaaatttgaagcagcaagtctgttgtctgaattgtactgtcaagagaattccgttgatgcagcaaagccgctgctgcggaaggcgatccagatctcacagcagaccccatattggcactgccgcctgctcttccagctcgctcaactgcacacgcttgagaaggacctggtgtcggcctgtgacctcctgggtgtaggggccgagtacgcccgggtggtgggatctgaatacacacgggcgctgttcctcctcagcaaggggatgctgctgctgatggagcgaaagctgcaggaggtgcacccgctgctgaccctctgcgggcagatcgtggagaactggcaggggaaccccatccagaaggagtcgctgcgtgtcttcttcctggtgctccaggtcacccactatctggatgccgggcaggtgaagagcgtgaagccgtgtctgaagcagctgcagcagtgcatccagaccatctccacactgcacgatgatgagatcctgcccagcaaccccgctgacctcttccactggctgcccaaggagcacatgtgtgtgcttgtctacctggtgactgtgatgcactccatgcaggccggctacctggagaaggcgcagaagtacacggacaaggccctcatgcagctggagaagctcaagatgctggactgcagccccatcctgtcatccttccaagtgatcctgctggagcacatcatcatgtgccgccttgtcacgggtcacaaggccacggcgctgcaggagatctcccaggtctgccagctgtgccagcagtccccccggctcttctccaaccatgcagcacagctgcacacattgctgggcctgtactgtgtctctgtcaactgcatggacaacgcggaagcccagttcaccacggccctgcggctcaccaaccaccaggagctgtgggccttcatcgtcaccaacctggcgagtgtgtatatacgggaaggaaatagacaccaagaggtactctacagtctgctggagaggatcaacccggaccacagcttccctgtcagctcgcactgcctccgagcagccgccttctatgtgcgtgggctcttctccttcttccagggacgctacaacgaggccaagcgatttctgcgggaaactctgaagatgtccaatgctgaggacctgaaccggctcacagcctgctccctcgtgcttctgggccacatcttctatgtgctgggaaaccacagggagagtaacaacatggtggtgcctgccatgcagctcgccagcaagatcccggacatgtcggtacagctgtggtcgtcagcactgctgagagacctgaataaagcctgtgggaacgccatggatgcccatgaagccgcccagatgcaccagaacttctcgcagcagctgctccaggaccacattgaggcctgcagcctccccgaacacaacctcatcacgtggacagacggtccaccccccgtgcagttccaagctcagaatggacccaacaccagcctggccagcctcctgtgaggccttgatggggccatccagctccgcagggcctgcgcgtctccggcttccacccagacggcactcaagcctgcccccgaggcgtgcttccttcctgattgtctctagagcttccaagtcctgggaatgtgcggggccagtccctgccctcccaggaggggtggtagccgttcccacctcgcagcaggacccccagtgcagaggctcacaggtggcacacaggcgctgtctctccagagccatccttcagagtggacctcagtgccagtcctgcctcagcatctgggtcacgtcggccaggagtagggtgcaggcctccagcaggtcctaatcctgtgtgccagggcaggcagtgccccaggggcaccacgcctgactctccatcacccaggccttgatgccgagcgggagtagagtgtttcctctgctcaaggcaatttccagagcccggatgccagtttctggcctgaatttggagggaagaagtaatggcgctagtgtgggacgaagcacagatcccagcacttttcccagctttctctccagcatcagtccctgcagcagctggggcctctggtcaggaaccctcagggacccaggaactcagcttccaaacatctgcaccttgaccggactcgccatcccgccgtgggggtgcaggtgattgtaaacacgggtgtgcatgtggatgcacacgggtgtgcggtgaagatctgtggagatggagctgggagctgaggctcctgttgcaccagccaccttcccccatcttgtggctgctgaggggcaggaagcgggggagtgggctcgtctcctaaatttaagatcacctcctcagctagcttagagtgcgtggcacgggccccccgcccccgagatctggagcccagggactttcttcctggcagatctgtggccttccctgctcagcctcttggtccccccactccctccaccgcctcaccttccctgctgggtctctggggcacagtgtgaaacccgcaccctagccaggccccagggagcctccgctgggcccagacagcagcgtttggttttatccacttttcttggataatcaggaggtgccccagtggtcacagtgtggcattccgagttggggcgggtggtcgggtcaagatagcagcagcaggtgtcagggctcaagacaccaccccctccagcttctggggcccaggagcctctccctgctacagggggtgggggtcctgctcagcagggtaggtggtggttttaggtcttgtcaccctcactcagtggaactgcctctgggagctttggcgtctgtgactaaagggacgctggattgctcaggtcagctgcttggggctcccaggctgggtgtgccttagccacaggcagggctgtcaataacccccttcctcactggccaccacctgacatcagcaccagtgacaggctggtcagagggcggggctggtgagggtttgtcctaagaggaccaccgccatctctgggtctccagggggagagcctggccctgtcctttgctacccagggctgcccccaggcccatgaagccaataggagagcgtgtggcactggcccacaaactgtccctgtcctgtcttcctcccgagccatggcctctgctagctccaccttgaaggagccccccacatcctcccctacatcccagagatgccaccacttgtgtctccacaatgtgctcctgcccacccgggttccgcactgtccgacccctgcacaccactcatgtcaccacggcgtgcatcatgttcatccccatctatttatttaagcctttctttgcttgtagggcattttgtatgtagagcagttgaaaacagaacctcagaacttaacatctgtcctgatgttaaagtgcttttcatgaccaccctgttatctatgtatatgtaaagttaaggatgagatcttaagtttacaattaaaaactcagtactcaatatttaatattctactcgagctttatggaagccaaatcatgtgcatgtgtgtgtgtgcgtgtgtgcaagctttgaacctccttccacagccgcatcttctcatgacacaaagcttttgataagtactttcctgtgggtcgctcagcgcctcatagcatctcattcaattgcaagaatagaggccagacacggtggcgcatgcctgtagtcccagctaactgggaggctgaggcaggaggatcacttgagcccaggagattgaggctgcagtgagcatgatcgcgacactgcactccagcctgggtgacggtgagactttgtctc

SEQ ID NO: 13295 - protein, 613 aa, Homo sapiens
  ref <308>: DATABASE ACCESSION NUMBER: Refseq / XP_048457
  ref <309>: DATABASE ENTRY DATE: 2002-08-01
MAAQAAAAAQAAAAQAAQAEAADSWYLALLGFAEHFRTSSPPKIRLCVHCLQAVFPFKPPQRIEARTHLQLGSVLYHHTKNSEQARSHLEKAWLISQQIPQFEDVKFEAASLLSELYCQENSVDAAKPLLRKAIQISQQTPYWHCRLLFQLAQLHTLEKDLVSACDLLGVGAEYARVVGSEYTRALFLLSKGMLLLMERKLQEVHPLLTLCGQIVENWQGNPIQKESLRVFFLVLQVTHYLDAGQVKSVKPCLKQLQQCIQTISTLHDDEILPSNPADLFHWLPKEHMCVLVYLVTVMHSMQAGYLEKAQKYTDKALMQLEKLKMLDCSPILSSFQVILLEHIIMCRLVTGHKATALQEISQVCQLCQQSPRLFSNHAAQLHTLLGLYCVSVNCMDNAEAQFTTALRLTNHQELWAFIVTNLASVYIREGNRHQEVLYSLLERINPDHSFPVSSHCLRAAAFYVRGLFSFFQGRYNEAKRFLRETLKMSNAEDLNRLTACSLVLLGHIFYVLGNHRESNNMVVPAMQLASKIPDMSVQLWSSALLRDLNKACGNAMDAHEAAQMHQNFSQQLLQDHIEACSLPEHNLITWTDGPPPVQFQAQNGPNTSLASLL

SEQ ID NO: 13296 - DNA, 464 bp, Rattus norvegicus
  ref <308>: DATABASE ACCESSION NUMBER: EMBL / AA893325
  ref <309>: DATABASE ENTRY DATE: 2000-03-03
cactgtacagatatgaactggtcatagctttatttagaataaaaagcctgaaacacacccagtgatctcaataggggatgaaatgccagtcataggggtgaaataatacactgattattaccaaaagataaatacaaaatactcttttggggtataaagaaaaatgaagctttattcaaagaaatactgaaaataaatgttttacaaattgcaatcaagcacttaaagtataatttggtaatgaattctcagaaactatataatacattctgctgttggccaatgcaaagtgtactttaaactagtattttacatatgctcaaccctcaatcatcttaccattcattgattataatgattcaacagtttcttatgtagtatctcagaaaaaaaaattccaaatacaaaacattcatgccagcaaggaagatgtaaagacacatgtaaattacggcaggactctg

SEQ ID NO: 13297 - protein, 439 aa, Rattus norvegicus
  ref <308>: DATABASE ACCESSION NUMBER: Refseq / NP_071966
  ref <309>: DATABASE ENTRY DATE: 2002-11-05
MLSKLASLQTVAALRRGLRTSVASATSVATKKTEQGPPSSEYIFERESKYGAHNYHPLPVALERGKGIYMWDVEGRQYFDFLSAYGAVSQGHCHPKIIEAMKSQVDKLTLTSRAFYNNVLGEYEEYITKLFNYNKVLPMNTGVEAGETACKLARRWGYTVKGIQKYKAKIVFAVGNFWGRTLSAVSSSTDPTSYDGFGPFMPGFETIPYNDLPALERALQDPNVAAFMVEPIQGEAGVIVPDPGYLTGVRELCTRHQVLFIADEIQTGLARTGRWLAVDHENVRPDIVLLGKALSGGLYPVSAVLCDDDIMLTIKPGEHGSTYGGNPLGCRIAIAALEVLEEEHLAENADKMGAILRKELMKLPSDVVTAVRGKGLLNAIVIRETKDCDAWKVCLRLRDNGLLAKPTHGDIIRLAPPLVIKEDEIRESVEIINKTILSF

SEQ ID NO: 13298 - DNA, 2013 bp, Homo sapiens; identical to SEQ ID NO: 4107
  ref <308>: DATABASE ACCESSION NUMBER: Refseq / NM_000274
  ref <309>: DATABASE ENTRY DATE: 2000-10-31

SEQ ID NO: 13299 - protein, 439 aa, Homo sapiens; identical to SEQ ID NO: 4108
  ref <308>: DATABASE ACCESSION NUMBER: Refseq / NP_000265
  ref <309>: DATABASE ENTRY DATE: 2000-10-31

SEQ ID NO: 13300 - DNA, 630 bp, Rattus norvegicus
  ref <308>: DATABASE ACCESSION NUMBER: EMBL / AA893552
  ref <309>: DATABASE ENTRY DATE: 2000-03-03
cagagatgccatttggtttaatcagcgtggtccccagggaggtatctcccactttccagtccatctagccccacgcctccctctaccactcttgggagtcaggggccctttcccaccccaagccatgggtgcagagttattcatatccaggcctacccagtcacgttctcctgctggtaacagaccacctaatcctaggtctgctatgctgtggggttgaccaccttccccatgaagaggatatcctgggagctggtggaatacaatatcaccaagaagggccggttgaatataaggtaacgtttcttgggctgggcagagaaaaaggtggaaaaggagccggtggctgctgctgcctttgtgccaacttcattcacatccaggacggtcttatggaaaactttggataagtacaatttctcctttttgctgatatttgagaagttggcatttggggtgaacagatcctggaagcccaagtcaggcaaaatctcatccaattcataggaatttgaaatggagaatttagggagctgcaatatgagctttctgtaaaagaacctattctgcagcaagcgtttccaccttagtagcatgcctggggacagcacctgctccacctcattcaac

SEQ ID NO: 13301 - protein, 423 aa, Rattus norvegicus
  ref <308>: DATABASE ACCESSION NUMBER: SWISS-Prot / AAB39509
  ref <309>: DATABASE ENTRY DATE: 2002-10-01
MHYTRCLLLLLAGLLELSHSQPDQEEPDNTTNQTYRQFSQQNISSYQIASGNANFAFRLYHLIASQNSEKNIFFSPLSISVSLAILSTGAGGDTQAQILEGLGFNLTKLSLPEIHEGFRSLQHTIARPFTEPQISVGSALILSQNLQILSEFVSAIETSYNSKVLHANFRDKEAAVQLINNYVKQNTQGKIKNLVSDLSPDVKMVLVNYIFFQGLWKKPFPSSRVSTSDFYVDENTVVKIPMMLQDKEDHWHLEDRRVPCTVLRMDYRGDAVAFFILPDQGKMNEVEQVLSPGMLLRWKRLLQNRFFYRKLILQLPKFSISNSYELDEILPDLGFQDLFTPNANFSNISKKEKLYLSKVFHKTVLDVNEVGTKAAAATGSFATFFSAQPKKRYLIFNRPFLVILYSTSSQDILFMGKVVNPTA

SEQ ID NO: 13302 - DNA, 1678 bp, Homo sapiens
  ref <308>: DATABASE ACCESSION NUMBER: Refseq / NM_006215
  ref <309>: DATABASE ENTRY DATE: 2002-11-05
cagagctgagacagccacccagggggtccactccaggacagactgtgccgcctgagagtgcagaggatgcatcttatcgactacctgctcctcctgctggttggactactggccctttctcatggccagctgcacgttgagcatgatggtgagagttgcagtaacagctcccaccagcagattctggagacaggtgagggctcccccagcctcaagatagcccctgccaatgctgactttgccttccgcttctactacctgatcgcttcggagaccccggggaagaacatctttttctccccgctgagcatctcggcggcctacgccatgctttccctgggggcctgctcacacagccgcagccagatccttgagggcctgggcttcaacctcaccgagctgtctgagtccgatgtccataggggcttccagcacctcctgcacactctcaacctccccggccatgggctggaaacacgcgtgggcagtgctctgttcctgagccacaacctgaagttccttgcaaaattcctgaatgacaccatggccgtctatgaggctaaactcttccacaccaacttctacgacactgtgggcacaatccagcttatcaacgaccacgtcaagaaggaaactcgagggaagattgtggatttggtcagtgagctcaagaaggacgtcttgatggtgctggtgaattacatttacttcaaagccctgtgggagaaaccattcatttcctcaaggaccactcccaaagacttttatgttgatgagaacacaacagtccgggtgcccatgatgctgcaggaccaggagcatcactggtatcttcatgacagatacttgccctgctcggtgctacggatggattacaaaggagacgcaaccgtgtttttcattctccctaaccaaggcaaaatgagggagattgaagaggttctgactccagagatgctaatgaggtggaacaacttgttgcggaagaggaatttttacaagaagctagagttgcatcttcccaagttctccatttctggctcctatgtattagatcagattttgcccaggctgggcttcacggatctgttctccaagtgggctgacttatccggcatcaccaaacagcaaaaactggaggcatccaaaagtttccacaaggccaccttggacgtggatgaggctggcaccgaggctgcagcagccaccagcttcgcgatcaaattcttctctgcccagaccaatcgccacatcctgcgattcaaccggcccttccttgtggtgatcttttccaccagcacccagagtgtcctctttctgggcaaggtcgtcgaccccacgaaaccatagccctcccagggctgctcatctgttccaagcaggaggatgtggcaggggagggctgggagtgagtagctctgtgtttagagttggggacaaggatgacaccgaaggtccaggagtccaggacagcaggtgctggccggtggggagcggggaggggcactgagatgggcagggcctggacattccacaccctggtgctgtgcagcctctggcagagcatccgacctcttggagcaagtttctgcctctggaaagggggcgggcccttttcacaacaggctggttgtaccgagtaaacaacacgatgccatgaaaaaaaaaaaaaaaaaaa

SEQ ID NO: 13303 - protein, 427 aa, Homo sapiens
  ref <308>: DATABASE ACCESSION NUMBER: Refseq / NP_006206
  ref <309>: DATABASE ENTRY DATE: 2002-11-05
MHLIDYLLLLLVGLLALSHGQLHVEHDGESCSNSSHQQILETGEGSPSLKIAPANADFAFRFYYLIASETPGKNIFFSPLSISAAYAMLSLGACSHSRSQILEGLGFNLTELSESDVHRGFQHLLHTLNLPGHGLETRVGSALFLSHNLKFLAKFLNDTMAVYEAKLFHTNFYDTVGTIQLINDHVKKETRGKIVDLVSELKKDVLMVLVNYIYFKALWEKPFISSRTTPKDFYVDENTTVRVPMMLQDQEHHWYLHDRYLPCSVLRMDYKGDATVFFILPNQGKMREIEEVLTPEMLMRWNNLLRKRNFYKKLELHLPKFSISGSYVLDQILPRLGFTDLFSKWADLSGITKQQKLEASKSFHKATLDVDEAGTEAAAATSFAIKFFSAQTNRHILRFNRPFLVVIFSTSTQSVLFLGKVVDPTKP

SEQ ID NO: 13304 - DNA, 564 bp, Rattus norvegicus; identical to SEQ ID NO: 6046
  ref <308>: DATABASE ACCESSION NUMBER: EMBL / AA893596
  ref <309>: DATABASE ENTRY DATE: 2000-03-03

SEQ ID NO: 13305 - protein, 307 aa, Rattus norvegicus; identical to SEQ ID NO: 6047

SEQ ID NO: 13306 - DNA, 3234 bp, Homo sapiens; identical to SEQ ID NO: 6048
  ref <308>: DATABASE ACCESSION NUMBER: EMBL / BC003542
  ref <309>: DATABASE ENTRY DATE: 2001-06-06

SEQ ID NO: 13307 - protein, 863 aa, Homo sapiens; identical to SEQ ID NO: 6049
  ref <308>: DATABASE ACCESSION NUMBER: SWISS-Prot / AAH03542
  ref <309>: DATABASE ENTRY DATE: 2003-02-01

SEQ ID NO: 13308 - DNA, 564 bp, Rattus norvegicus; identical to SEQ ID NO: 6046
  ref <308>: DATABASE ACCESSION NUMBER: EMBL / AA893596
  ref <309>: DATABASE ENTRY DATE: 2000-03-03

SEQ ID NO: 13309 - protein, 307 aa, Rattus norvegicus; identical to SEQ ID NO: 6047

SEQ ID NO: 13310 - DNA, 3234 bp, Homo sapiens; identical to SEQ ID NO: 6048
  ref <308>: DATABASE ACCESSION NUMBER: EMBL / BC003542
  ref <309>: DATABASE ENTRY DATE: 2001-06-06

SEQ ID NO: 13311 - protein, 863 aa, Homo sapiens; identical to SEQ ID NO: 6049
  ref <308>: DATABASE ACCESSION NUMBER: SWISS-Prot / AAH03542
  ref <309>: DATABASE ENTRY DATE: 2003-02-01

SEQ ID NO: 13312 - DNA, 567 bp, Rattus norvegicus
  ref <308>: DATABASE ACCESSION NUMBER: EMBL / AA893602
  ref <309>: DATABASE ENTRY DATE: 2000-03-03
cacatcgaattccattttaaaaacaaaaataattttaattaaaacaatttcttggcattgttcaaaaacataagactctttttacaaaagaaaacttcccatcttggttttaaaaaaggcaaacgaggaagtaagctgcattagacataagaggatggacagcctctgcagccacaggagaaatgtgtttgctttcttattacagttagctccttctgtgggagcctggagtcttgcatttgttttatgcatattgggccttgttgtattacttggcaggagcctgtactcccttgagtcagccgtgctcattggtcagaacacattccagcatctgacatcaatcccattaatcacgggcgggcgtgagtgagatgactcaacagtgagcagtgccggctatgcatggtattcagtgatgagaggtcggagatcctctgaattcagcatacgtgagatgccaaggacaaagtcctctcacatcaaataggtagtgcatgatcactaatactcttaatgcttcaaccttgaagggatttaaatgaatttccacataaagccatcttc

SEQ ID NO: 13313 - protein, 405 aa, Rattus norvegicus
  ref <308>: DATABASE ACCESSION NUMBER: SWISS-Prot / BAA88213
  ref <309>: DATABASE ENTRY DATE: 2001-12-01
MDTLVEDDICILNHEKAHRREAVTPLSAYPGDESVASHFALVTAYEDIKKRLKDSEKENSFLKKRIRALEERLVGARADEETSSVGREQVNKAYHAYREVCIDRDNLKNQLEKINKDNSESLKMLNEQLQSKEVELLQLRTEVETQQVMRNLNPPSSSWEVEKLSCDLKIHGLEQELGLLRKECSDLRTELQKARQTGPPQEDILQGRDVIRPSLSREEHVPHQGLHHSDNMQHAYWELKREMSNLHLVTQVQAELLRKLKTSAAVKKACTPVGCVEDLGRDSTKLHLTNFTATYKRHPSLSPNGKAPCYAPSSPLPGDRKVFSDKAVLQSWTDNERLVPNDGADFPEHSSYGRNSLEDNSWVFPSPPKSSETAFGENKSKILPLSNLPPLHYLDQQNQNCLYKS

SEQ ID NO: 13314 - DNA, 2248 bp, Homo sapiens
  ref <308>: DATABASE ACCESSION NUMBER: Refseq / NM_022461
  ref <309>: DATABASE ENTRY DATE: 2002-05-14
agctcatccacacttccaatcactttccggagtgcttcccctccctccggcccgtgctggtcccgacggcgggcctgggtctcgcgcgcgtattgctgggtaacgggccttctcccgcgtcggcccggcccctcctgcctcggctcgtccctccttccagaacgtcccgggctcctgccgagtcagaagaaatgggactccctccgcgacgtgcccggagcagctcccttcgctgtggaagcggcggtgtcttcgaagaaaccggaagcccgtggtgacccctggcgacccggtttgttttcggtccgtttccaaacactaaggaatcgaaactcggcggccttgggggcggccctacgtagcctggcttctggttgtcatggatgcactggtagaagatgatatctgtattctgaatcatgaaaaagcccataagagagatacagtgaccccagtttcaatatattcaggagatgaatctgttgcttcccattttgctcttgtcactgcatatgaagacatcaaaaaacgacttaaggattcagagaaagagaactctttgttaaagaagagaataagatttttggaagaaaagctaatagctcgatttgaagaagaaacaagttccgtgggacgagaacaagtaaataaggcctatcatgcatatcgagaggtttgcattgatagagataatttgaagagcaaactggacaaaatgaataaagacaactctgaatctttgaaagtattgaatgagcagctacaatctaaagaagtagaactcctccagctgaggacagaggtggaaactcagcaggtgatgaggaatttaaatccaccttcatcaaactgggaggtggaaaagttgagctgtgacctgaagatccatggtttggaacaagagctggaactgatgaggaaagaatgtagcgatctcaaaatagaactacagaaagccaaacaaacggatccatatcaggaagacaatctgaagagcagagatctccaaaaactaagcatttcaagtgataatatgcagcatgcatactgggaactgaagagagaaatgtctaatttacatctggtgactcaagtacaagctgaactactaagaaaactgaaaacctcaactgcaatcaagaaagcctgtgcccctgtaggatgcagtgaagaccttggaagagacagcacaaaactgcacttgatgaattttactgcaacatacacaagacatccccctctcttaccaaatggcaaagctctttgtcataccacatcttcccctttaccaggagatgtaaaggttttatcagagaaagcaatcctccaatcatggacagacaatgagagatccattcctaatgatggtacatgctttcaggaacacagttcttatggcagaaattctctggaagacaattcctgggtatttccaagtcctcctaaatcaagtgagacagcatttggggaaactaaaactaaaactttgcctttacccaaccttccaccactgcattacttggatcaacataatcagaactgcctttataagaattaatttggaagagattcacgatttcaccatgaggacacttatctctttcagtggtcctcccaagaaattatttaacaaactgaaaggagattttgattaaaattttgcagaggtcttcagtatctatatttgaacacactgtacaatagtacaaaaaccaacatagttggttttctagtatgaaagagcaccctctagctccatattctaagaatctgaaatatgctactatactaattaataagtaaacttaaggtgtttaaaaaactctgccttctatattaattgtaaaattttgcctctcagaagaatggaattggagattgtagacgtggttttacaaaatgtgaaatgtctaaatatctgttcataaaaataaaaggaaaacatgtttcttcaaattgcataatggaacaaatggcaatgtgagtaggttacatttctgttgttataatgcgtaaagatattgaaaatataatgaaataaaagcatcttaggttataccatctttatatgctattgcgtttcaatatttaagatttaaagtgattttttggtcacagtgttttgttgataaaatttttttagaattgaagtttgaattctaagacttgaaacaacctgatcattgaagccaactttgtcccagcacattccttaagtcctaattgggaaaaaaaaaaaaaaaaaaaa

SEQ ID NO: 13315 - protein, 392 aa, Homo sapiens
  ref <308>: DATABASE ACCESSION NUMBER: Refseq / NP_071906
  ref <309>: DATABASE ENTRY DATE: 2002-05-14
MDALVEDDICILNHEKAHKRDTVTPVSIYSGDESVASHFALVTAYEDIKKRLKDSEKENSLLKKRIRFLEEKLIARFEEETSSVGREQVNKAYHAYREVCIDRDNLKSKLDKMNKDNSESLKVLNEQLQSKEVELLQLRTEVETQQVMRNLNPPSSNWEVEKLSCDLKIHGLEQELELMRKECSDLKIELQKAKQTDPYQEDNLKSRDLQKLSISSDNMQHAYWELKREMSNLHLVTQVQAELLRKLKTSTAIKKACAPVGCSEDLGRDSTKLHLMNFTATYTRHPPLLPNGKALCHTTSSPLPGDVKVLSEKAILQSWTDNERSIPNDGTCFQEHSSYGRNSLEDNSWVFPSPPKSSETAFGETKTKTLPLPNLPPLHYLDQHNQNCLYKN

SEQ ID NO: 13316 - DNA, 427 bp, Rattus norvegicus
  misc_feature (1)..(427): n=a, c, g or t
  ref <308>: DATABASE ACCESSION NUMBER: EMBL / AA893671
  ref <309>: DATABASE ENTRY DATE: 2000-03-03
agctgccgccagtaggggcctgtgcggggacttccagggcccggaggcgggctgcgtgcactcggcgccgccgcagcccccaccgaccgggccgctgtcgcagcccccaccggtgcctccagccgccgcggggccactcgctgggcagccgcgcaagaccagttcgtcgcgccgcaacgcgtggggcaacctgtcgtacgccgacctcatggacggagataccttggattttaactttgataatgtgttgcccaaccaaagcttcccgcacagtgtcaagactacaacacacagctgggtgtcaggctaggagttagtgagcaggcaacatttaaaagtccttcagattgtctgacaccgggaactgaggagcagtccaaagatgcccttcagccctccttttagttttcttgattaanaaaagagg

SEQ ID NO: 13317 - protein, 439 aa, Rattus norvegicus
  ref <308>: DATABASE ACCESSION NUMBER: SWISS-Prot / Q63244
  ref <309>: DATABASE ENTRY DATE: 1997-11-01
MGSDLEGAGSSDVPSPLSAAGDDSLGSDGDCAANSPAAGSGAGDLEGGGGERNSSGGASTQDDPEVTDGSRTQASPVGPCAGSVGGGEGARSKPYTRRPKPPYSYIALIAMAIRDSAGGRLTLAEINEYLMGKFPFFRGSYTGWRNSVRHNLSLNDCFVKVLRDPSRPWGKDNYWMLNPNSEYTFADGVFRRRRKRLSHRTTVSASGYGGGSPPGPAGTPQPAPTAGSSPIARSPARQEEGSSPASKFSSSFAIDSILSKPFRSRRDGTRLWGCSYPGALLPARRCAPIPRSFPRRPAVPCCRSVLTARRAHAAGVARGRGAARGAPVRGAPLHRGPSQAISRSGDRRRGAPVLPPTAAHGPAGGRGLRSGSAPVLPGGDAASLTGAWSSAGGSRVELGAPFVMEGTFCHGGWNAGSRAVHFPPSPRNRDFFSTLHQMC

SEQ ID NO: 13318 - DNA, 3421 bp, Homo sapiens
  ref <308>: DATABASE ACCESSION NUMBER: EMBL / U02310
  ref <309>: DATABASE ENTRY DATE: 2000-03-04
gtcaccatggccgaggcgcctcaggtggtggagatcgacccggacttcgagccgctgccccggccgcgctcgtgcacctggccgctgcccaggccggagtttagccagtccaactcggccacctccagcccggcgccgtcgggcagcgcggctgccaaccccgacgccgcggcgggcctgccctcggcctcggctgccgctgtcagcgccgacttcatgagcaacctgagcttgctggaggagagcgaggacttcccgcaggcgcccggctccgtggcggcggcggtggcggcggcggccgccgcggccgccaccggggggctgtgcggggacttccagggcccggaggcgggctgcctgcacccagcgccaccgcagcccccgccgcccgggcccgtgtcgcagcacccgccggtgccccccgccgccgctgggccgctcgcggggcagccgcgcaagagcagctcgtcccgccgcaacgcgtggggcaacctgtcctacgccgacctcatcaccaaggccatcgagagctcggcggagaagcggctcacgctgtcgcagatctacgagtggatggtcaagagcgtgccctacttcaaggataagggtgacagcaacagctcggcgggctggaagaattcaattcgtcataatctgtccctacacagcaagttcattcgtgtgcagaatgaaggaactggaaaaagttcttggtggatgctcaatccagagggtggcaagagcgggaaatctcctaggagaagagctgcatccatggacaacaacagtaaatttgctaagagccgaagccgagctgccaagaagaaagcatctctccagtctggccaggagggtgctggggacagccctggatcacagttttccaaatggcctgcaagccctggctctcacagcaatgatgactttgataactggagtacatttcgccctcgaactagctcaaatgctagtactattagtgggagactctcacccattatgaccgaacaggatgatcttggagaaggggatgtgcattctatggtgtacccgccatctgccgcaaagatggcctctactttacccagtctgtctgagataagcaatcccgaaaacatggaaaatcttttggataatctcaaccttctctcatcaccaacatcattaactgtttcgacccagtcctcacctggcaccatgatgcagcagacgccgtgctactcgtttgcgccaccaaacaccagtttgaattcacccagcccaaactaccaaaaatatacatatggccaatccagcatgagccctttgccccagatgcctatacaaacacttcaggacaataagtcgagttatggaggtatgagtcagtataactgtgcgcctggactcttgaaggagttgctgacttctgactctcctccccataatgacattatgacaccagttgatcctggggtagcccagcccaacagccgggttctgggccagaacgtcatgatgggccctaattcggtcatgtcaacctatggcagccaggcatctcataacaaaatgatgaatcccagctcccatacccaccctggacatgctcagcagacatctgcagtcaacgggcgtcccctgccccacacggtaagcaccatgccccacacctcgggtatgaaccgcctgacccaagtgaagacacctgtacaagtgcctctgccccaccccatgcagatgagtgccctggggggctactcctccgtgagcagctgcaatggctatggcagaatgggccttctccaccaggagaagctcccaagtgacttggatggcatgttcattgagcgcttagactgtgacatggaatccatcattcggaatgacctcatggatggagatacattggattttaactttgacaatgtgttgcccaaccaaagcttcccacacagtgtcaagacaacgacacatagctgggtgtcaggctgagggttagtgagcaggttacacttaaaagtacttcagattgtctgacagcaggaactgagagaagcagtccaaagatgtctttcaccaactcccttttagttttcttggttaaaaaaaaaaacaaaaaaaaaaaccctccttttttcctttcgtcagacttggcagcaaagacatttttcctgtacaggatgtttgcccaatgtgtgcaggttatgtgctgctgtagataaggactgtgccattggaaatttcattacaatgaagtgccaaactcactacaccatataattgcagaaaagattttcagatcctggtgtgctttcaagttttgtatataagcagtagatacagattgtatttgtgtgtgtttttggtttttctaaatatccaattggtccaaggaaagtttatactctttttgtaatactgtgatgggcctcatgtcttgataagttaaacttttgtttgtactacctgttttctgcggaactgacggatcacaaagaactgaatctccattctgcatctccattgaacagccttggacctgttcacgttgccacagaattcacatgagaaccaagtagcctgttatcaatctgctaaattaatggacttgttaaacttttggaaaaaaaaagattaaatgccagctttgtacaggtcttttctatttttttttgtttattttgttatttgcaaatttgtacaaacatttaaatggttctaatttccagataaatgatttttgatgttattgttgggacttaagaacatttttggaatagatattgaactgtaataatgttttcttaaaactagagtctactttgttacatagtcagcttgtaaattttgtggaaccacaggtatttgggggcagcattcataattttcattttgtattctaactggattagtactaattttatacatgcttaactggtttgtacactttgggatgctacttagtgatgtttctgactaatcttaaatcattgtaattagtacttgcatattcaacgtttcaggccctggttgggcaggaaagtgatgtatagttatggacactttgcgtttcttatttaggataacttaatatgtttttatgtatgtattttaaagaaatttcactgcttctctgaactatgcgtactgcatagcatcaagtcttctctagagacctctgtagtcctgggaggcctcataatgtttgtagatacagaaagggagactgcatctaaagcaatggtcctttgtcaaacgagggattttgatccacttcaccattttgagttgagctttagcaaaagtttccctcataattctttgctcttgtttcagtccaggtggaggttggttttgtagttctgccttgaggaattatgtcaacactcatacttcatctcattctcccttctgccctgcagattagattacttagcac

SEQ ID NO: 13319 - protein, 656 aa, Homo sapiens
  misc_feature (1)..(656): Xaa=Unknown amino acid
MAEAPQVVEIDPDFEPLPRPRSCTWPLPRPEFSQSNSATSSPAPSGSAAANPDAAAGLPSASAAAVSADFMSNLSLLEESEDFPQAPGSVAAAVAAAAAAAATGGLCGDFQGPEAGCLHPAPPQPPPPGPVSQHPPVPPAAAGPLAGQPRKSSSSRRNAWGNLSYADLITKAIESSAEKRLTLSQIYEWMVKSVPYFKDKGDSNSSAGWKNSIRHNLSLHSKFIRVQNEGTGKSSWWMLNPEGGKSGKSPRRRAASMDNNSKFAKSRSRAAKKKASLQSGQEGAGDSPGSQFSKWPASPGSHSNDDFDNWSTFRPRTSSNASTISGRLSPIMTEQDDLGEGDVHSMVYPPSAAKMASTLPSLSEISNPENMENLLDNLNLLSSPTSLTVSTQSSPGTMMQQTPCYSFAPPNTSLNSPSPNYQKYTYGQSSMSPLPQMPIQTLQDNKSSYGGMSQYNCAPGLLKELLTSDSPPHNDIMTPVDPGVAQPNSRVLGQNVMMGPNSVMSTYGSQASHNKMMNPSSHTHPGHAQQTSAVNGRPLPHTVSTMPHTSGMNRLTQVKTPVQVPLPHPMQMSALGGYSSVSSCNGYGRMGLLHQEKLPSDLDGMFIERLDCDMESIIRNDLMDGDTLDFNFDNVLPNQSFPHSVKTTTHSWVSGX

SEQ ID NO: 13320 - DNA, 492 bp, Rattus norvegicus; identical to SEQ ID NO: 6108
  ref <308>: DATABASE ACCESSION NUMBER: EMBL / AA893690
  ref <309>: DATABASE ENTRY DATE: 2000-03-03

SEQ ID NO: 13321 - protein, 133 aa, Rattus norvegicus; identical to SEQ ID NO: 6109
  ref <308>: DATABASE ACCESSION NUMBER: Refseq / NP_062308
  ref <309>: DATABASE ENTRY DATE: 2002-01-07

SEQ ID NO: 13322 - DNA, 952 bp, Homo sapiens
  ref <308>: DATABASE ACCESSION NUMBER: EMBL / BC010665
  ref <309>: DATABASE ENTRY DATE: 2001-07-13
ggaagctctgcctctttccccagtgggcgagggaactcggggcgattggctgggaactgtatccacccaaatgtcaccgatttcttcctatgcaggaaatgagcagacccatcaataagaaatttctcagcctggccgaaaatggttggccccacgaagccacgacaactggaggcaaagagggttgctcaacgccccgcctcattggaaaaccaaatcagatctgggacctatatagcgtggcggaggcggggcgatgattgtcgcgctcgcacccactgcagctgcgcacagtcgcatttctttccccgcccctgagaccctgcagcaccatctgtcatggcggctgggctgtttggtttgagcgctcgccgtcttttggcggcagcggcgacgcgagggctcccggccgcccgcgtccgctgggaatctagcttctccaggactgtggtcgccccgtccgctgtggcgggaaagcggcccccagaaccgaccacaccgtggcaagaggacccagaacccgaggacgaaaacttgtatgagaagaacccagactcccatggttatgacaaggaccccgttttggacgtctggaacatgcgacttgtcttcttctttggcgtctccatcatcctggtccttggcagcacctttgtggcctatctgcctgactacaggatgaaagagtggtcccgccgcgaagctgagaggcttgtgaaataccgagaggccaatggccttcccatcatggaatccaactgcttcgaccccagcaagatccagctgccagaggatgagtgaccagttgctaagtggggctcaagaagcaccgccttccccaccccctgcctgccattctgacctcttctcagagcacctaattaaaggggctgaaagtctgaaaaaaaaaaaaaaaaaaaaaaaaaaaaaaaaaaaaaaaaaaaaaaaaaaa

SEQ ID NO: 13323 - protein, 153 aa, Homo sapiens; identical to SEQ ID NO: 6111
  ref <308>: DATABASE ACCESSION NUMBER: SWISS-Prot / AAH10665
  ref <309>: DATABASE ENTRY DATE: 2002-10-01

SEQ ID NO: 13324 - DNA, 392 bp, Rattus norvegicus
  ref <308>: DATABASE ACCESSION NUMBER: EMBL / AA893885
  ref <309>: DATABASE ENTRY DATE: 2000-03-03
caggaacttggtactttttaaaaattccaaatctttgcacacagatcagcactctgcttactctggaactgcagatgcttggacttcacgattgtcacttctctccttgtatcacacagcatagaaaacccaagtcctgatgctccccaaccccttctgaactactacagctactctgaccagctgctgtctgaatacattctgcagtgtgggggaatagctataccaagttatgccacacacattctggaatgcaccgtacccaggacacaggtgagtttccctttgtgttctgtgtggttcaagccaacactgctgaggttatctagtccctgagggagctcagaagtttggtaaaggtcaaagagagactccttaagcattcagcagtg

SEQ ID NO: 13325 - DNA, 416 bp, Rattus norvegicus; identical to SEQ ID NO: 6145
  ref <308>: DATABASE ACCESSION NUMBER: EMBL / AA893939
  ref <309>: DATABASE ENTRY DATE: 2000-03-03

SEQ ID NO: 13326 - protein, 70 aa, Rattus norvegicus; identical to SEQ ID NO: 6146
  ref <308>: DATABASE ACCESSION NUMBER: Refseq / NP_033195
  ref <309>: DATABASE ENTRY DATE: 2002-01-07

SEQ ID NO: 13327 - DNA, 400 bp, Rattus norvegicus
  ref <308>: DATABASE ACCESSION NUMBER: EMBL / AA893985
  ref <309>: DATABASE ENTRY DATE: 2000-03-03
agtctccagaaatttcaactttatttagctcataaagagtatctgttctctactctgtggacatagtcgagtattggatagatcccgttttaatgactgggaatgtcttctgggagggctaaactccattgtcactttgacaggatttagaatcaccaaggagacaaactgctgtgtgtgcgagtgtgtctgtgtgtgtgagtgtgtgtgtaatgtgtgtgagtgtgtgtgtatttgtgagtgtgtgtgtgtgagtgtatatgtgagagtgtgtgtgtgagtgcatatgtgtgagtgtgtgtgtgagtgtatatgtgtgtgtgtgtgtgtgtgcgcacacgcacgtgcgtgcactcactggactataaaatggtcagggtgccttcactaaatatggacc

SEQ ID NO: 13328 - DNA, 430 bp, Rattus norvegicus
  ref <308>: DATABASE ACCESSION NUMBER: EMBL / AA894004
  ref <309>: DATABASE ENTRY DATE: 2000-03-03
gggaacagaacgtgtcctttattgagcatccagagggcccctcagttctgactcagcagccagaggggaaacaagcaggcaggtggtgggggcaggagagcagggatggggacacccaccctcacttccagtccttgaagaactgcttgaagatgggactctctcggccctggggcagaatctccacctgagtgtttggggaatatctcattcgagagatgaagccatcagccacttggagggccgcctgccgctccttctcattggcttttctccccttccagatgtagattttgccacatagcccgttgtccagaacaaagcagtcatctggaattagcagttcagaggcaaacgggctggagtcagccaccttggtcagattcatctgtccagtggcatcagagaccttatacagggctgcagcctg

SEQ ID NO: 13329 - protein, 349 aa, Rattus norvegicus
  ref <308>: DATABASE ACCESSION NUMBER: Refseq / NP_031625
  ref <309>: DATABASE ENTRY DATE: 2002-09-18
MYTPIPQSGSPFPASVQDPGLHIWRVEKLKPWPIARESHGIFFSGDSYLVLHNGPEEASHLHLWIGQQSSRDEQGACAVLAVHLNTLLGERPVQHRELQGNESDLFMSYFPRGLKYREGGGRVGISQDNLRATPAAIRKLYQVKGKKNIRATERALSWDSFNTGDCFILDLGQNIFAWCGGKSNILERNKARDLALAIRDSERQGKAQVEIITDGEEPAEMIQVLGPKPALKEGNPEEDITADQTNAQAAALYKVSDATGQMNLTKVADSSPFASELLIPDDCFVLDNGLCGKIYIWKGRKANEKERQAALQVADGFISRMRYSPNTQVEILRQGRESPIFKQFFKNWK

SEQ ID NO: 13330 - DNA, 1244 bp, Homo sapiens
  ref <308>: DATABASE ACCESSION NUMBER: EMBL / BC000728
  ref <309>: DATABASE ENTRY DATE: 2001-07-13
ggcacgagggcaggctggaaggaagacgaacctacgaagcagagatctgaagacagcatgtacacagccattccccagagtggctctccattcccaggctcagtgcaggatccaggcctgcatgtgtggcgggtggagaagctgaagccggtgcctgtggcgcaagagaaccagggcgtcttcttctcgggggactcctacctagtgctgcacaatggcccagaagaggtttcccatctgcacctgtggataggccagcagtcatcccgggatgagcagggggcctgtgccgtgctggctgtgcacctcaacacgctgctgggagagcggcctgtgcagcaccgcgaggtgcagggcaatgagtctgacctcttcatgagctacttcccacggggcctcaagtaccaggaaggtggtgtggagtcagcatttcacaagacctccacaggagccccagctgccatcaagaaactctaccaggtgaaggggaagaagaacatccgtgccaccgagcgggcactgaactgggacagcttcaacactggggactgcttcatcctggacctgggccagaacatcttcgcctggtgtggtggaaagtccaacatcctggaacgcaacaaggcgagggacctggccctggccatccgggacagtgagcgacagggcaaggcccaggtggagattgtcactgatggggaggagcctgctgagatgatccaggtcctgggccccaagcctgctctgaaggagggcaaccctgaggaagacctcacagctgacaaggcaaatgcccaggccgcagctctgtataaggtctctgatgccactggacagatgaacctgaccaaggtggctgactccagcccctttgcccttgaactgctgatatctgatgactgctttgtgctggacaacgggctctgtggcaagatctatatctggaaggggcgaaaagcgaatgagaaggagcggcaggcagccctgcaggtggccgagggcttcatctcgcgcatgcagtacgccccgaacactcaggtggagattctgcctcagggccgtgagagtcccatcttcaagcaatttttcaaggactggaaatgagggtgggcgtcttcctgccccatgctcccctgccccccaccacctgcctgcttgcttctctggctgcctggtcagtgcagaggtgccccctgcagatgttcaataaaggagacaagtgctttaaaaaaaaaaaaaaaaaa

SEQ ID NO: 13331 - protein, 348 aa, Homo sapiens
  ref <308>: DATABASE ACCESSION NUMBER: SWISS-Prot / AAH00728
  ref <309>: DATABASE ENTRY DATE: 2001-10-16
MYTAIPQSGSPFPGSVQDPGLHVWRVEKLKPVPVAQENQGVFFSGDSYLVLHNGPEEVSHLHLWIGQQSSRDEQGACAVLAVHLNTLLGERPVQHREVQGNESDLFMSYFPRGLKYQEGGVESAFHKTSTGAPAAIKKLYQVKGKKNIRATERALNWDSFNTGDCFILDLGQNIFAWCGGKSNILERNKARDLALAIRDSERQGKAQVEIVTDGEEPAEMIQVLGPKPALKEGNPEEDLTADKANAQAAALYKVSDATGQMNLTKVADSSPFALELLISDDCFVLDNGLCGKIYIWKGRKANEKERQAALQVAEGFISRMQYAPNTQVEILPQGRESPIFKQFFKDWK

SEQ ID NO: 13332 - DNA, 485 bp, Rattus norvegicus
  misc_feature (1)..(485): n=a, c, g or t
  ref <308>: DATABASE ACCESSION NUMBER: EMBL / AA894232
  ref <309>: DATABASE ENTRY DATE: 2000-03-03
agggaggaaagggtttattggccttatatgtcaacatccatagtccatcactgcaggaagtctgaacagaaactcaagcaagtcaggagaggaacgtggaggcaggacttgatgcagaggtcactgangaggcttgctcgcatggcctgctgtcttacaaactcagaaccacaagcttaggtacggccttgctgatattttaggagtagtctcacatcttttactaattaagaaaatgctctacaggcttgcctatataccaattttgtgaaggtatttaatcagtgttccctactctcagatgattccattgtgtaccaagttagcataaatttagtcagtatttttcaagaaacctgcagatctttgctggagatgtctagagagaaagaaccatgtgagagtcgaaatctcattaagcagcaggcccaagaggattttgcttagatatagagaactgtggaggaaaattcaaacccctcgtg

SEQ ID NO: 13333 - DNA, 554 bp, Rattus norvegicus
  ref <308>: DATABASE ACCESSION NUMBER: EMBL / AA894297
  ref <309>: DATABASE ENTRY DATE: 2000-03-03
agccatcagaattccctttacatccattctgttgagcagtatccagtcaacctgctcatcctgcttcaggtcatcagttgtatttaggcacaaaggttttagttttgtctcgacaccaagttttaatcacttgaggtaactgctacagcaggaggaccttgttgaaaaatgtgctaaacacttttcatcttctgtcagtacaaattaatgtcctttccttaagtagagttaggcatttttggttttagaattggtacccatcataaagcaagacacctcacctgtggagtcagcattagaacacccagtgtcggcagcccctgcatgggcacggccagcacaggctctgccctgtggcctcggagactgtgctactgagctctttggtttgctgcatgcagccatgcttacctcttctgccaccacagggtcgcttttgtcagcaggtgccaggccgctgtcccatatgccacactaggactctggggctgcttcacatattagacatagtaagctgtaacacagtaatcgtgatggtacaaccacccagtcaa

SEQ ID NO: 13334 - DNA, 466 bp, Rattus norvegicus; identical to SEQ ID NO: 6336
  ref <308>: DATABASE ACCESSION NUMBER: EMBL / AA926149
  ref <309>: DATABASE ENTRY DATE: 2000-03-03

SEQ ID NO: 13335 - protein, 527 aa, Rattus norvegicus
  ref <308>: DATABASE ACCESSION NUMBER: Refseq / NP_036652
  ref <309>: DATABASE ENTRY DATE: 2002-11-05
MADSRDPASDQMKQWKEQRAPQKPDVLTTGGGNPIGDKLNIMTAGPRGPLLVQDVVFTDEMAHFDRERIPERVVHAKGAGAFGYFEVTHDITRYSKAKVFEHIGKRTPIAVRFSTVAGESGSADTVRDPRGFAVKFYTEDGNWDLVGNNTPIFFIRDAMLFPSFIHSQKRNPQTHLKDPDMVWDFWSLCPESLHQVTFLFSDRGIPDGHRHMNGYGSHTFKLVNANGEAVYCKFHYKTDQGIKNLPVEEAGRLAQEDPDYGLRDLFNAIASGNYPSWTFYIQVMTFKEAETFPFNPFDLTKVWPHKDYPLIPVGKLVLNRNPANYFAEVEQMAFDPSNMPPGIEPSPDKMLQGRLFAYPDTHRHRLGPNYLQIPVNCPYRARVANYQRDGPMCMHDNQGGAPNYYPNSFSAPEQQGSALEHHSQCSADVKRFNSANEDNVTQVRTFYTKVLNEEERKRLCENIANHLKDAQLFIQRKAVKNFTDVHPDYGARVQALLDQYNSQKPKNAIHTYVQAGSHIAAKGKANL

SEQ ID NO: 13336 - DNA, 2279 bp, Homo sapiens
  ref <308>: DATABASE ACCESSION NUMBER: Refseq / NM_001752
  ref <309>: DATABASE ENTRY DATE: 2000-10-31
tgcctgctgagggtggagacccacgagccgaggcctcctgcagtgttctgcacagcaaaccgcacgctatggctgacagccgggatcccgccagcgaccagatgcagcactggaaggagcagcgggccgcgcagaaagctgatgtcctgaccactggagctggtaacccagtaggagacaaacttaatgttattacagtagggccccgtgggccccttcttgttcaggatgtggttttcactgatgaaatggctcattttgaccgagagagaattcctgagagagttgtgcatgctaaaggagcaggggcctttggctactttgaggtcacacatgacattaccaaatactccaaggcaaaggtatttgagcatattggaaagaagactcccatcgcagttcggttctccactgttgctggagaatcgggttcagctgacacagttcgggaccctcgtgggtttgcagtgaaattttacacagaagatggtaactgggatctcgttggaaataacacccccattttcttcatcagggatcccatattgtttccatcttttatccacagccaaaagagaaatcctcagacacatctgaaggatccggacatggtctgggacttctggagcctacgtcctgagtctctgcatcaggtttctttcttgttcagtgatcgggggattccagatggacatcgccacatgaatggatatggatcacatactttcaagctggttaatgcaaatggggaggcagtttattgcaaattccattataagactgaccagggcatcaaaaacctttctgttgaagatgcggcgagactttcccaggaagatcctgactatggcatccgggatctttttaacgccattgccacaggaaagtacccctcctggactttttacatccaggtcatgacatttaatcaggcagaaacttttccatttaatccattcgatctcaccaaggtttggcctcacaaggactaccctctcatcccagttggtaaactggtcttaaaccggaatccagttaattactttgctgaggttgaacagatagccttcgacccaagcaacatgccacctggcattgaggccagtcctgacaaaatgcttcagggccgcctttttgcctatcctgacactcaccgccatcgcctgggacccaattatcttcatatacctgtgaactgtccctaccgtgctcgagtggccaactaccagcgtgatggcccgatgtgcatgcaggacaatcagggtggtgctccaaattactaccccaacagctttggtgctccggaacaacagccttctgccctggagcacagcatccaatattctggagaagtgcggagattcaacactgccaatgatgataacgttactcaggtgcgggcattctatgtgaacgtgctgaatgaggaacagaggaaacgtctgtgtgagaacattgccggccacctgaaggatgcacaaattttcatccagaagaaagcggtcaagaacttcactgaggtccaccctgactacgggagccacatccaggctcttctggacaagtacaatgctgagaagcctaagaatgcgattcacacctttgtgcagtccggatctcacttggcggcaagggagaaggcaaatctgtgaggccggggccctgcacctgtgcagcgaagcttagcgttcatccgtgtaacccgctcatcactggatgaagattctcctgtgctagatgtgcaaatgcaagctagtggcttcaaaatagagaatcccactttctatagcagattgtgtaacaattttaatgctatttccccaggggaaaatgaaggttaggatttaacagtcatttaaaaaaaaaatttgttttgacggatgattggattattcatttaaaatgattagaaggcaagtttctagctagaaatatgattttatttgacaaaatttgttgaaattatgtatgtttacatatcacctcatggcctattatattaaaatatggctataaatatataaaaagaaaagataaagatgatctactcagaaatttttatttttctaaggttctcataggaaaagtacatttaatacagcagtgtcatcagaagataacttgagcaccgtcatggcttaatgtttattcctgataataattgatcaaattcatttttttcactggagttacattaatgttaattcagcactgatttcacaacagatcaatttgtaattgcttacatttttacaataaataatctgtacgtaagaaca

SEQ ID NO: 13337 - protein, 527 aa, Homo sapiens
  ref <308>: DATABASE ACCESSION NUMBER: Refseq / NP_001743
  ref <309>: DATABASE ENTRY DATE: 2000-10-31
MADSRDPASDQMQHWKEQRAAQKADVLTTGAGNPVGDKLNVITVGPRGPLLVQDVVFTDEMAHFDRERIPERVVHAKGAGAFGYFEVTHDITKYSKAKVFEHIGKKTPIAVRFSTVAGESGSADTVRDPRGFAVKFYTEDGNWDLVGNNTPIFFIRDPILFPSFIHSQKRNPQTHLKDPDMVWDFWSLRPESLHQVSFLFSDRGIPDGHRHMNGYGSHTFKLVNANGEAVYCKFHYKTDQGIKNLSVEDAARLSQEDPDYGIRDLFNAIATGKYPSWTFYIQVMTFNQAETFPFNPFDLTKVWPHKDYPLIPVGKLVLNRNPVNYFAEVEQIAFDPSNMPPGIEASPDKMLQGRLFAYPDTHRHRLGPNYLHIPVNCPYRARVANYQRDGPMCMQDNQGGAPNYYPNSFGAPEQQPSALEHSIQYSGEVRRFNTANDDNVTQVRAFYVNVLNEEQRKRLCENIAGHLKDAQIFIQKKAVKNFTEVHPDYGSHIQALLDKYNAEKPKNAIHTFVQSGSHLAAREKANL

SEQ ID NO: 13338 - DNA, 596 bp, Rattus norvegicus; identical to SEQ ID NO: 6353
  ref <308>: DATABASE ACCESSION NUMBER: EMBL / AA944177
  ref <309>: DATABASE ENTRY DATE: 2000-03-03

SEQ ID NO: 13339 - protein, 215 aa, Rattus norvegicus
  ref <308>: DATABASE ACCESSION NUMBER: Refseq / NP_037095
  ref <309>: DATABASE ENTRY DATE: 2002-10-20
MGKGDPKKPRGKMSSYAFFVQTCREEHKKKHPDASVNFSEFSKKCSERWKTMSAKEKGKFEDMAKADKARYEREMKTYIPPKGETKKKFKDPNAPKRPPSAFFLFCSEYRPKIKGEHPGLSIGDVAKKLGEMWNNTAADDKQPYEKKAAKLKEKYEKDIAAYRAKGKPDAAKKGVVKAEKSKKKKEEEDDEEDEEDEEEEEEEEDEDEEEDDDDE

SEQ ID NO: 13340 - DNA, 1009 bp, Homo sapiens
  ref <308>: DATABASE ACCESSION NUMBER: EMBL / X12597
  ref <309>: DATABASE ENTRY DATE: 1993-09-12
gggggacgggcactgggcgactctgtgcctcgctgaggaaaaataactaaacatgggcaaaggagatcctaagaagccgagaggcaaaatgtcatcatatgcattttttgtgcaaacttgtcgggaggagcataagaagaagcacccagatgcttcagtcaacttctcagagttttctaagaagtgctcagagaggtggaagaccatgtctgctaaagagaaaggaaaatttgaagatatggcaaaagcggacaaggcccgttatgaaagagaaatgaaaacctatatccctcccaaaggggagacaaaaaagaagttcaaggatcccaatgcacccaagaggcctccttcggccttcttcctcttctgctctgagtatcgcccaaaaatcaaaggagaacatcctggcctgtccattggtgatgttgcgaagaaactgggagagatgtggaataacactgctgcagatgacaagcagccttatgaaaagaaggctgcgaagctgaaggaaaaatacgaaaaggatatagctgcatatcgagctaaaggaaagcctgatgcagcaaaaaagggagttgtcaaggctgaaaaaagcaagaaaaagaaggaagaggaggaagatgaggaagatgaagaggatgaggaggaggaggaagatgaagaagatgaagatgaagaagaagatgatgatgatgaataagttggttctagcgcagttttttttttcttgtctataaagcatttaacccccctgtacacaactcactcccttttaaagaaaaaaattgaaatgtaaggctgtgtaagatttgtttttaaactgtacagtgtctttttttgtatagttaacacactaccgaatgtgtctttagatagccctgtcctggtggtattttcaatagccactaaccttgcctggtacagtatgggggttgtaaattggcatggaaatttaaagcaggttcttgttggtgcacagcacaaattagttatatatggggatggtagt

SEQ ID NO: 13341 - protein, 214 aa, Homo sapiens; identical to SEQ ID NO: 3848
  ref <308>: DATABASE ACCESSION NUMBER: SWISS-Prot / P09429
  ref <309>: DATABASE ENTRY DATE: 2002-06-15

SEQ ID NO: 13342 - DNA, 616 bp, Rattus norvegicus
  ref <308>: DATABASE ACCESSION NUMBER: EMBL / AA945573
  ref <309>: DATABASE ENTRY DATE: 2000-03-03
attattttatagtgaagctttattttaactcaggaatggatacacaatgacacaagggatcataaattgttatatgaaagagataatacaagtggatttgtgctataactccagaaactgcatgtgctttctggatcttaagacaagagtcaggatggatgatagagggaagggactggataaaaacctgaaggggattgcagaaggcaacacagtagaagccaaaatgcctgatctattcaggaaggaatgaagcagagctggtaagtgggtggcagagaggcaaaaccattcagaactggcatcgtatcaatgtcctttgggtgaaccagagatttcaggttaaagttctgtaaaatggttgtcaagaatagaaacaactgcatgcgggccaggccctctccaacacaagctcgttttcctgctgagaaaggcaaaaagtagtcacttttcttaaagtttccattctcatctagaaagtggccagggtcaaacatctctgggttggggaactccttgctgtcatgcagcactgatgtcagtgatgttaacacttttgttcccttcgggatcaggtagttcctgaatttaaagtcacaggtcactgcatggggca

SEQ ID NO: 13343 - protein, 490 aa, Rattus norvegicus; identical to SEQ ID NO: 5073
  ref <308>: DATABASE ACCESSION NUMBER: Refseq / NP_058854
  ref <309>: DATABASE ENTRY DATE: 2002-11-05

SEQ ID NO: 13344 - DNA, 1473 bp, Homo sapiens; identical to SEQ ID NO: 5074
  ref <308>: DATABASE ACCESSION NUMBER: Refseq / NM_000769
  ref <309>: DATABASE ENTRY DATE: 2002-11-05

SEQ ID NO: 13345 - protein, 490 aa, Homo sapiens; identical to SEQ ID NO: 5075
  ref <308>: DATABASE ACCESSION NUMBER: Refseq / NP_000760
  ref <309>: DATABASE ENTRY DATE: 2002-11-05

SEQ ID NO: 13346 - DNA, 491 bp, Rattus norvegicus
  ref <308>: DATABASE ACCESSION NUMBER: EMBL / AA946292
  ref <309>: DATABASE ENTRY DATE: 2000-03-03
ggcacagcccacaccacccacttcgcccgagcctcctcgaggcagccctggaccgagccttgcgcctggccccgtccgagagaagggcgcggcaagaggggtccggaccggggcagccctgagtaccggcagcgacgcgagcgcaacaacatcgctgtgcgcaagagccgggacaaggccaagcgccgcaaccaggagatgcagcagaagctggtggagctgtcggccgagaacgagaagctgcatcagcgtgtggagcagctcacccgggacctggccagcctccggcagttcttcaaagagctgcccagcccgcctttcctgccgcccaccggcaccgactgccggtaacgcgcggtgtgggccttagagactccgaacgaccgatacctcagaccccgacggcggggagcacacgccgcccgaattgctacagtttcttgggcactggactgcgagagaagctatatgaatcccccttaaattagttt

SEQ ID NO: 13347 - protein, 268 aa, Rattus norvegicus
  ref <308>: DATABASE ACCESSION NUMBER: Refseq / NP_037286
  ref <309>: DATABASE ENTRY DATE: 2000-11-01
MSAALFSLDSPARGAPWPTEPAAFYEPGRVGKPGRGPEPGDLGEPGSTTPAMYDDESAIDFSAYIDSMAAVPTLELCHDEIFADLFNSNHKAAGAGSLELLQGGPTRPPGVGSIARGPLKREPDWGDGDAPGSLLPAQVAVCAQTVVSLAAAAQPTPPTSPEPPRGSPGPSLAPGPVREKGAGKRGPDRGSPEYRQRRERNNIAVRKSRDKAKRRNQEMQQKLVELSAENEKLHQRVEQLTRDLASLRQFFKELPSPPFLPPTGTDCR

SEQ ID NO: 13348 - DNA, 1248 bp, Homo sapiens
  ref <308>: DATABASE ACCESSION NUMBER: Refseq / NM_005195
  ref <309>: DATABASE ENTRY DATE: 2002-11-05
gacagcctcgcttggacgcagagcccggcccgacgccgccatgagcgccgcgctcttcagcctggacggcccggcgcgcggcgcgccctggcctgcggagcctgcgcccttctacgaaccgggccgggcgggcaagccgggccgcggggccgagccaggggccctaggcgagccaggcgccgccgcccccgccatgtacgacgacgagagcgccatcgacttcagcgcctacatcgactccatggccgccgtgcccaccctggagctgtgccacgacgagctcttcgccgacctcttcaacagcaatcacaaggcgggcggcgcggggcccctggagcttcttcccggcggccccgcgcgccccttgggcccgggccctgccgctccccgcctgctcaagcgcgagcccgactggggcgacggcgacgcgcccggctcgctgttgcccgcgcaggtgggcccgtgcgcacagaccgtggtgagcttggcggccgcagggcagcccaccccgcccacgtcgccggagccgccgcgcagcagccccaggcagacccccgcgcccggccccgcccgggagaagagcgccggcaagaggggcccggaccgcggcagccccgagtaccggcagcggcgcgagcgcaacaacatcgccgtgcgcaagagccgcgacaaggccaagcggcgcaaccaggagatgcagcagaagttggtggagctgtcggctgagaacgagaagctgcaccagcgcgtggagcagctcacgcgggacctggccggcctccggcagttcttcaagcagctgcccagcccgcccttcctgccggccgccgggacagcagactgccggtaacgcgcggccggggcgggagagactcagcaacgacccatacctcagacccgacggcccggagcggagcgcgccctgccctggcgcagccagagccgccgggtgcccgctgcagtttcttgggacataggagcgcaaagaagctacagcctggacttaccaccactaaactgcgagagaagctaaacgtgtttattttcccttaaattatttttgtaatggtagctttttctacatcttactcctgttgatgcagctaaggtacatttgtaaaaagaaaaaaaaccagacttttcagacaaaccctttgtattgtagataagaggaaaagactgagcatgctcacttttttatattaatttttacagtatttgtaagaataaagcagcatttgaaatcgc

SEQ ID NO: 13349 - protein, 269 aa, Homo sapiens [sequence omitted]

SEQ ID NO: 13350 - DNA, 442 bp, Rattus norvegicus; identical to SEQ ID NO: 6401
  ref <308>: DATABASE ACCESSION NUMBER: EMBL / AA955167
  ref <309>: DATABASE ENTRY DATE: 2000-03-03

SEQ ID NO: 13351 - protein, 309 aa, Rattus norvegicus
  ref <308>: DATABASE ACCESSION NUMBER: Refseq / NP_032564
  ref <309>: DATABASE ENTRY DATE: 2002-09-30
MGAQFSKTAAKGEATAERPGEAAVASSPSKANGQENGHVKVNGDASPAAAEPGAKEELQANGSAPAADKEEPASGSAATPAAAEKDEAAAATEPGAGAADKEAAEAEPAEPSSPAAEAEGASASSTSSPKAEDGAAPSPSSETPKKKKKRFSFKKSFKLSGFSFKKSKKESGEGAEAEGATAEGAKDEAAAAAGGEGAAAPGEQAGGAGAEGAAGGEPREAEAAEPEQPEQPEQPAAEEPQAEEQSEAAGEKAEEPAPGATAGDASSAAGPEQEAPAATDEAAASAAPAASPEPQPECSPEAPPAPTAE

SEQ ID NO: 13352 - DNA, 411 bp, Rattus norvegicus; identical to SEQ ID NO: 6404
  ref <308>: DATABASE ACCESSION NUMBER: EMBL / AA955477
  ref <309>: DATABASE ENTRY DATE: 2000-03-03

SEQ ID NO: 13353 - protein, 385 aa, Rattus norvegicus; identical to SEQ ID NO: 6405
  ref <308>: DATABASE ACCESSION NUMBER: SWISS-Prot / CAA54183
  ref <309>: DATABASE ENTRY DATE: 2001-10-16

SEQ ID NO: 13354 - DNA, 2532 bp, Homo sapiens
  ref <308>: DATABASE ACCESSION NUMBER: EMBL / BC010407
  ref <309>: DATABASE ENTRY DATE: 2001-07-13
ggcacgagggcggccgccagctcccgcgaccgcctctcctgcccctcgccggtacctcagcaaggtgccactagaagcgccaggctggggccgcctctgagcgccccgcgggggccatggatggtgaaacagcagaggagcaggggggccctgtgcccccgccagttgcacccggcggacccggcttgggcggtgctccgggggggcggcgggagcccaagaagtacgcagtgaccgacgactaccagttgtccaagcaggtgctgggcctgggtgtgaacggcaaagtgctggagtgcttccatcggcgcactggacagaagtgtgccctgaagctcctgtatgacagccccaaggcccggcaggaggtagaccatcactggcaggcttctggcggcccccatattgtctgcatcctggatgtgtatgagaacatgcaccatggcaagcgctgtctcctcatcatcatggaatgcatggaaggtggtgagttgttcagcaggattcaggagcgtggcgaccaggctttcactgagagagaagctgcagagataatgcgggatattggcactgccatccagtttctgcacagccataacattgcccaccgagatgtcaagcctgaaaacctactctacacatctaaggagaaagacgcagtgcttaagctcaccgattttggctttgctaaggagaccacccaaaatgccctgcagacaccctgctatactccctattatgtggcccctgaggtcctgggtccagagaagtatgacaagtcatgtgacatgtggtccctgggtgtcatcatgtacatcctcctttgtggcttcccacccttctactccaacacgggccaggccatctccccggggatgaagaggaggattcgcctgggccagtacggcttccccaatcctgagtggtcagaagtctctgaggatgccaagcagctgatccgcctcctgttgaagacagaccccacagagaggctgaccatcactcagttcatgaaccacccctggatcaaccaatcgatggtagtgccacagaccccactccacacggcccgagtgctgcaggaggacaaagaccactgggacgaagtcaaggaggagatgaccagtgccttggccactatgcgggtagactacgaccaggtgaagatcaaggacctgaagacctctaacaaccggctcctcaacaagaggagaaaaaagcaggcaggcagctcctctgcctcacagggctgcaacaaccagtagctcatggggccttggaggagcctggcctctcagcctgcataacagactgaaatgtgctcaggccctggccaggagggcccagggtcattcttttaacaaaaggattattttgttgtgttttaatttgtcactcggaacttcaggatggaggaccctgaccctaagcctccttcagatctctggcccaggctcaagccctagagatgggcagggcctaggggctgggagctgcctgctgccatagcagcacctttagctaggttggcccgagtgaggcctctgtgctgtcctgccctggtgcatggccttagctttctaggccactgggagttgtggctgggcttcccatcttccacagagacatctccctgtgggatgggcagatgggcctggccttgagaaaggcattggccattggttgccatggtgaccagggaccacgttgctgcctgtgaatgctgagtgagcgagtaagggaggaggggcgattgagggttcacctctgccttggggaggctgatttctcacacactggctggccctctcattctcactcctccttgggccctgaggctgctggatccagtctgcctgcctccctgtgcagtccagccctgccttgctgcagccccagcccagatggcactcagcgctctcccctgagggagtccctgggcctagccatcccctcactattcccgacccaaagggtgacttttcatctgaacttaaggtgggagatatttttaacttttttccactttggaaaatgtcactgtgacaaaagccagcatactttccctgcacccatctgctcaccagatctcaggcaggaaagcccctctctgttgaagtcaggggctatcttttggtatacttgtgtgaaagtggctggttgggagcagagctaagtggcttcccattaacctgaggtctctttctttactctgggtcagacctgaggttggggaaggcgactgagccatgctcagaatgtctggtcctggcttgggcctgagtagggcagagagggcctttcatggctgatcagagcttaccagccccaccccaccatggtagccttagggtgctgagtgcctgatactgcctgacaagtgcctgacacgcagcctagttccttcctggcccctctctcactggctgggaaaccctagaccatgtcagataggacaacactgctgggttttacatccagatagtaataaacaccatttcatcattaaaaaaaaaaaaaaaaaaaaaaaaa

SEQ ID NO: 13355 - protein, 382 aa, Homo sapiens; identical to SEQ ID NO: 6407
  ref <308>: DATABASE ACCESSION NUMBER: SWISS-Prot / AAH10407
  ref <309>: DATABASE ENTRY DATE: 2003-02-01

SEQ ID NO: 13356 - DNA, 332 bp, Rattus norvegicus
  ref <308>: DATABASE ACCESSION NUMBER: EMBL / AA963674
  ref <309>: DATABASE ENTRY DATE: 2000-03-03
cggccgctgtgcccacagggacaaggacacagactgctgagcgatggctgtcacactgcagtacgcgtgggtgtgctgggctgcttcagccgcagggttctgcatagccagccagcgaagtccacgtcctccccctcagagcgtttgatgaaggcatggttcagacacacagtccaccaccaccagtgctccatcagtgacacgcagagcagcggtcacctctgaggagaagtccacatgacctggagagtcaatgaggttgatgaggaagcccgagccatccttgctctgcttaatgaagttcaggtcgttctcggagagctcatagaaga

SEQ ID NO: 13357 - protein, 858 aa, Rattus norvegicus
  ref <308>: DATABASE ACCESSION NUMBER: Refseq / NP_058941
  ref <309>: DATABASE ENTRY DATE: 2002-11-05
MVNFTVDQIRAIMDKKANIRNMSVIAHVDHGKSTLTDSLVCKAGIIASARAGETRFTDTRKDEQERCITIKSTAISLFYELSENDLNFIKQSKDGSGFLINLIDSPGHVDFSSEVTAALRVTDGALVVVDCVSGVCVQTETVLRQAIAERIKPVLMMNKMDRALLELQLEPEELYQTFQRIVENVNVIISTYGEGESGPMGNIMIDPVLGTVGFGSGLHGWAFTLKQFAEMYVAKFAAKGEGQLGAAERAKKVEDMMKKLWGDRYFDPANGKFSKSANSPDGKKLPRTFCQLILDPIFKVFDAIMNFRKEETAKLIEKLDIKLDSEDKDKEGKPLLKAVMRRWLPAGDALLQMITIHLPSPVTAQKYRCELLYEGPPDDEAAMGIKSCDPKGPLMMYISKMVPTSDKGRFYAFGRVFSGVVSTGLKVRIMGPNYTPGKKEDLYLKPIQRTILMMGRYVEPIEDVPCGNIVGLVGVDQFLVKTGTITTFEHAHNMRVMKFSVSPVVRVAVEAKNPADLPKLVEGLKRLAKSDPMVQCIIEESGEHIIAGAGELHLEICLKDLEEDHACIPIKKSDPVVSYRETVSEESNVLCLSKSPNKHNRLYMKARPFPDGLAEDIDKGEVSARQELKARARYLAEKYEWDVAEARKIWCFGPDGTGPNILTDITKGVQYLNEIKDSVVAGFQWATKEGALCEENMRGVRFDVHDVTLHADAIHRGGGQIIPTARRCLYASVLTAQPRLMEPIYLVEIQCPEQVVGGIYGVLNRKRGHVFEESQVAGTPMFVVKAYLPVNESFGFTADLRSNTGGQAFPQCVFDHWQILPGDPFDNSSRPSQVVAETRKRKGLKEGIPALDNFLDKL

SEQ ID NO: 13358 - DNA, 332 bp, Rattus norvegicus; identical to SEQ ID NO: 13356
  ref <308>: DATABASE ACCESSION NUMBER: EMBL / AA963674
  ref <309>: DATABASE ENTRY DATE: 2000-03-03

SEQ ID NO: 13359 - protein, 858 aa, Rattus norvegicus; identical to SEQ ID NO: 13357
  ref <308>: DATABASE ACCESSION NUMBER: Refseq / NP_058941
  ref <309>: DATABASE ENTRY DATE: 2002-11-05

SEQ ID NO: 13360 - DNA, 477 bp, Rattus norvegicus
  ref <308>: DATABASE ACCESSION NUMBER: EMBL / AA998882
  ref <309>: DATABASE ENTRY DATE: 2000-03-03
cggccgctttctttggagactgggctcccacggactttttggataaagaaacagaaggtggtggaactgaactgtagggacctgcttttttcttcatgggttttttctgttcctcttcctcttcactggaagagtcctcactgctagaactcttttgggtgggggcagcagttacttttactggtgccttggccacgacttgctttttaggtgcagtcttcttgagaggtgcagctgccttcttctcttcctctgagtcatcactgctactgctgctgctactgctgctgctgctgcctgctttgccattggctgctttaggctgtgctttcgctggtggacctggtttggctggggctttagtctgggctttagtcggggctttagctgccgtagcagctgcctttggcttctgggtctgtggtgcttcatcctctgagcttgagtcagactcggactcagagctctctgccttct

SEQ ID NO: 13361 - protein, 704 aa, Rattus norvegicus; identical to SEQ ID NO: 5996
  ref <308>: DATABASE ACCESSION NUMBER: Refseq / NP_074060
  ref <309>: DATABASE ENTRY DATE: 2001-01-24

SEQ ID NO: 13362 - DNA, 549 bp, Rattus norvegicus
  ref <308>: DATABASE ACCESSION NUMBER: EMBL / AI009098
  ref <309>: DATABASE ENTRY DATE: 2000-03-03
agaaaagaatattttattgaaacagtttctcaattaacaatggaacaaagtacaatttgattcaaacctgtccaaccagcctgaactgctaatgaaagaactcaaacacacaggggggaactgtgtaggacctttaagtctctctgccaatgtggcaaaaaaaaaaaaaaaaaaggtggagaggggtgggggtggggtagaaaagacaaaacaactgacatcaggtttgctttgcccctgcactggggtggccctacctcctgctacaggtgcaatactggaggacaggcactctaggcatggttatagtgggcaaggggctctccttcctggcaaaggacactgtcaagttgaaccctgacccctctttctttacccacaaagcttgcctgagagtgaggtggcatttttacattcacaccatgatctctgtcccacagggtcttgggaaaggggctcacagtagatagcacatttttggtcagcccagggggaagaaggaaagagcctgaagggtagattttacaggaactggggatgaccaggatg

SEQ ID NO: 13363 - DNA, 1611 bp, Homo sapiens
  ref <308>: DATABASE ACCESSION NUMBER: EMBL / BC004560
  ref <309>: DATABASE ENTRY DATE: 2001-07-13
ggcacgagggccgcgtccggggccggctggtgcgcgagacgccgccgagaggggcactatggcagacaaagttaggaggcagaggccgaggaggcgagtctgttgggccttggtggctgtgctcttggcagacctgttggcactgagtgatacactggcagtgatgtctgtggacctgggcagtgagtccatgaaggtggccattgtcaaacctggagtgcccatggaaattgtcttgaataaggaatctcggaggaaaacaccggtgatcgtgaccctgaaagaaaatgaaagattctttggagacagtgcagcaagcatggcgattaagaatccaaaggctacgctacgttacttccagcacctcctggggaagcaggcagataacccccatgtagctctttaccaggcccgcttcccggagcacgagctgactttcgacccacagaggcagactgtgcactttcagatcagctcgcagctgcagttctcacccctgtgatttggaggtgtggagaaggggaagggagggacagctcactggttccactcttctctggtgattgttccttccctcccttcctctcccaccatgcgatgagcatcctttcaggccagtgtctgcagagcctcagttaccaggtttggtttctgagtgcctatctgtgctctttcctccctctgcgggcttctcttgctctgagcctcccttccccattcccatgcagctcctttccccctgggtttccttggcttcctgcagcaaattgggcagttctctgccccttgcctaaaagcctgtacctctggattggcggaagtaaatctggaaggattctcactcgtatttcccacccctagtggccagaggagggaggggcacagtgaagaagggagcccaccacctctccgaagaggaaagccacgtagagtggttggcatggggtgccagcatcgtgcaagctctgtcataatctgcatcttcccagcagcctggtaccccaggttcctgtaactccctgcctcctcctctcttctgctgttctgctcctcccagacagagcctttccctcaccccctgaccccctgggctgaccaaaatgtgctttctactgtgagtccctatcccaagatcctggggaaaggagagaccatggtgtgaatgtagagatgccacctccctctctctgaggcaggcctgtggatgaaggaggagggtcagggctggccttcctctgtgcatcactctgctaggttgggggcccccgacccaccatacctacgcctagggagcccgtcctccagtattccgtctgtagcaggagctagggctgctgcctcagctccaagacaagaatgaacctggctgtgtcagtcattttgtcttttcctttttttttttttttgccacattggcagagatgggacctaagggtcccacccctcaccccacccccaccttttctgtatgtttgaattctttcagtagctgttgatgctggttggacaggtttgagtcaaattgtactttgctccattgttaattgagaaactgtttcaataaaatattcttttctacaaaaaaaaaaaaaaaaaaaaaaaaaaaaaaaa

SEQ ID NO: 13364 - protein, 147 aa, Homo sapiens
  ref <308>: DATABASE ACCESSION NUMBER: SWISS-Prot / AAH04560
  ref <309>: DATABASE ENTRY DATE: 2002-10-01
MADKVRRQRPRRRVCWALVAVLLADLLALSDTLAVMSVDLGSESMKVAIVKPGVPMEIVLNKESRRKTPVIVTLKENERFFGDSAASMAIKNPKATLRYFQHLLGKQADNPHVALYQARFPEHELTFDPQRQTVHFQISSQLQFSPL

SEQ ID NO: 13365 - DNA, 612 bp, Rattus norvegicus
  ref <308>: DATABASE ACCESSION NUMBER: EMBL / AI009111
  ref <309>: DATABASE ENTRY DATE: 2000-03-03
gacgatcaccgaaccgtagttgaggccgtgttcctgtgtccgctgctgtgtctggttgtaacctcgccggagctatgtttcgcaaccagtatgacaacgatgtcactgtttggagccctcagggcaggattcatcaaatcgaatatgcaatggaagctgtaaagcaaggctcagcgacagtcggcctgaagtcgaagacacatgcagtgctggtcgcgctgaagagagcacagtcagagcttgccgctcaccagaagaaaattctccacgttgacaaccatattggtatctcaattgcgggtctaactgctgatgccagactgttatgtaactttatgcgccaggagtgtttggattccagatttgtatttgacagaccacttcccgtatctcgccttgtgtctctaattggaagcaagacccagataccaacacagcgatatggccggagaccgtatggtgttgggctgctcattgctggttatgatgacatgggccctcacgttttccaaacctggccatctgctaactattttgactgcagagctatgtccatcggagcccgttcccagtcagctcgcacttacctggagagacacatgtcttgaattt

SEQ ID NO: 13366 - protein, 263 aa, Rattus norvegicus
  ref <308>: DATABASE ACCESSION NUMBER: Refseq / NP_058974
  ref <309>: DATABASE ENTRY DATE: 2002-11-05
MFRNQYDNDVTVWSPQGRIHQIEYAMEAVKQGSATVGLKSKTHAVLVALKRAQSELAAHQKKILHVDNHIGISIAGLTADARLLCNFMRQECLDSRFVFDRPLPVSRLVSLIGSKTQIPTQRYGRRPYGVGLLIAGYDDMGPHVFQTCPSANYFDCRAMSIGARSQSARTYLERHMSEFMQCNLDELVKHGLRALRETLPAEQDLTTKNVSIGIVGKDLEFTIYDDDDVSPFLDGLEERPQRKAQPSQAADEPAEKADEPMEH

SEQ ID NO: 13367 - DNA, 1244 bp, Homo sapiens
  ref <308>: DATABASE ACCESSION NUMBER: Refseq / NM_002786
  ref <309>: DATABASE ENTRY DATE: 2002-11-05
ggaaactcccgcagacttctctgtagatcgctgagcgatactttcggcagcacctccttgattctcagttttgctggaggccgcaaccaggcccgcgccgccaccatgtttcgaaatcagtatgacaatgatgtcactgtttggagcccccagggcaggattcatcaaattgaatatgcaatggaagctgttaaacaaggttcagccacagttggtctgaaatcaaaaactcatgcagttttggttgcattgaaaagggcgcaatcagagcttgcagctcatcagaaaaaaattctccatgttgacaaccacattggtatctcaattgcggggcttactgctgatgctagactgttatgtaattttatgcgtcaggagtgtttggattccagatttgtattcgatagaccactgcctgtgtctcgtcttgtatctctaattggaagcaagacccagataccaacacaacgatatggccggagaccatatggtgttggtctccttattgctggttatgatgatatgggccctcacattttccaaacctgtccatctgctaactattttgactgcagagccatgtccattggagcccgttcccaatcagctcgtacttacttggagagacatatgtctgaatttatggagtgtaatttaaatgaactagttaaacatggtctgcgtgccttaagagagacgcttcctgcagaacaggacctgactacaaagaatgtttccattggaattgttggtaaagacttggagtttacaatctatgatgatgatgatgtgtctccattcctggaaggtcttgaagaaagaccacagagaaaggcacagcctgctcaacctgctgatgaacctgcagaaaaggctgatgaaccaatggaacattaagtgataagccagtctatatatgtattatcaaatatgtaagaatacaggcaccacatactgatgacaataatctatactttgaaccaaaagttgcagagtggtggaatgctatgctatgttttaggaatcagtccagatgtgagttttttccaagcaacctcactgaaacctatataatggaatacatttttctttgaaagggtctgtataatcattttctagaagtatgggtatctatactaatgttttttatataagaacataggtgtctttgtggttttaaagacaactgtgaaataaaattgtttcaccgcctggtaaaaaaaaaaaaaaaaaaaaaaaaaaaa

SEQ ID NO: 13368 - protein, 263 aa, Homo sapiens
  ref <308>: DATABASE ACCESSION NUMBER: Refseq / NP_002777
  ref <309>: DATABASE ENTRY DATE: 2002-11-05
MFRNQYDNDVTVWSPQGRIHQIEYAMEAVKQGSATVGLKSKTHAVLVALKRAQSELAAHQKKILHVDNHIGISIAGLTADARLLCNFMRQECLDSRFVFDRPLPVSRLVSLIGSKTQIPTQRYGRRPYGVGLLIAGYDDMGPHIFQTCPSANYFDCRAMSIGARSQSARTYLERHMSEFMECNLNELVKHGLRALRETLPAEQDLTTKNVSIGIVGKDLEFTIYDDDDVSPFLEGLEERPQRKAQPAQPADEPAEKADEPMEH

SEQ ID NO: 13369 - DNA, 620 bp, Rattus norvegicus
  ref <308>: DATABASE ACCESSION NUMBER: EMBL / AI010357
  ref <309>: DATABASE ENTRY DATE: 2000-03-03
gttattgggcaaaaccgttttattaactgacccaagcacttcattttttttctgatttgaggtaaaaccattaaacacagctcacaagaaaatacaatgactatttaactacaattacaagagtctgaaacctcactagttgttcagataatacttttacaaatgtatacaactgcagagtctacttaagctaggtttagtattaaccaagagtattatccaagacctagacacctgactactatttttgaagcgactacgagttttgtaacaacagaaggatttaactgttaccttaggaatgtattttcctttcaaaatcacccagctagtgccatgtagtgttttctcattcttcagagatgtcagtggaagcttttgaaaagcgcacacctgttcctgtcctgtatattgctctcaaattttacatttggccaataaccacataaccattgccctgctacaagcaacagatttttcttttgcaaagttctaccttgaattttcagattctgttgtagttccaactgccaattaccaggtgtgtgagagttactgtgtgtgggagtgtccacgtggggacagggatgataaatcagtccatgaacacaggcaatgtg

SEQ ID NO: 13370 - protein, 223 aa, Rattus norvegicus
  ref <308>: DATABASE ACCESSION NUMBER: Refseq / NP_068534
  ref <309>: DATABASE ENTRY DATE: 2002-11-05
MAAEDVVATGADPSELEGGGLLQEIFTSPLNLLLLGLCIFLLYKIVRGDQPGASGDNDDDEPPPLPRLKPRDFTPAELRRYDGVQDPRILMAINGKVFDVTKGRKFYGPEGPYGVFAGRDASRGLATFCLDKEALKDEYDDLSDLTPAQQETLNDWDSQFSSPSSTITWGKLLEGAEEPIVYSDDEEQKMRLLGRVTEAVSGAYLFLYFAKSFVTFQSVFTTW

SEQ ID NO: 13371 - DNA, 1890 bp, Homo sapiens
  ref <308>: DATABASE ACCESSION NUMBER: Refseq / NM_006667
  ref <309>: DATABASE ENTRY DATE: 2001-07-26
gacccacgcgtccggggaggagaaagtggcgagttccggatccctgcctagcgcggcccaacctttactccagagatcatggctgccgaggatgtggtggcgactggcgccgacccaagcgatctggagagcggcgggctgctgcatgagattttcacgtcgccgctcaacctgctgctgcttggcctctgcatcttcctgctctacaagatcgtgcgcggggaccagccggcggccagcggcgacagcgacgacgacgagccgccccctctgccccgcctcaagcggcgcgacttcacccccgccgagctgcggcgcttcgacggcgtccaggacccgcgcatactcatggccatcaacggcaaggtgttcgatgtgaccaaaggccgcaaattctacgggcccgaggggccgtatggggtctttgctggaagagatgcatccaggggccttgccacattttgcctggataaggaagcactgaaggatgagtacgatgacctttctgacctcactgctgcccagcaggagactctgagtgactgggagtctcagttcactttcaagtatcatcacgtgggcaaactgctgaaggagggggaggagcccactgtgtactcagatgaggaagaaccaaaagatgagagtgcccggaaaaatgattaaagcattcagtggaagtatatctatttttgtattttgcaaaatcatttgtaacagtccactctgtctttaaaacatagtgattacaatatttagaaagttttgagcacttgctataagttttttaattaacatcactagtgacactaataaaattaacttcttagaatgcatgatgtgtttgtgtgtcacaaatccagaaagtgaactgcagtgctgtaatacacatgttaatactgtttttcttctatctgtagttagtacaggatgaatttaaatgtgtttttcctgagagacaaggaagacttgggtatttcccaaaacaggtaaaaatcttaaatgtgcaccaagagcaaaggatcaacttttagtcatgatgttctgtaaagacaacaaatccctttttttttctcaattgacttaactgcatgatttctgttttatctacctctaaagcaaatctgcagtgttccaaagactttggtatggattaagcgctgtccagtaacaaaatgaaatctcaaaacagagctcagctgcaaaaaagcatattttctgtgtttctggactgcactgttgtccttgccctcacatagacactcagacaccctcacaaacacagtagtctatagttaggattaaaataggatctgaacattcaaaagaaagctttggaaaaaaagagctggctggcctaaaaacctaaatatatgatgaagattgtaggactgtcttcccaagccccatgttcatggtggggcaatggttatttggttattttactcaattggttactctcatttgaaatgagggagggacatacagaataggaacaggtgtttgctctcctaagagccttcatgcacacccctgaaccacgaggaaacagtacagtcgctagtcaagtggtttttaaagtaaagtatattcataaggtaacagttattctgttgttataaaactatacccactgcaaaagtagtagtcaagtgtctaggtctttgatattgctcttttggttaacactaagcttaagtagactatacagttgtatgaatttgtaaaagtatatgaacacctagtgagatttcaaacttgtaattgtggttaaatagtcattgtattttcttgtgaactgtgttttatgattttacctcaaatcagaaaacaaaatgatgtgctttggtcagttaataaaaatggttttacccactaaaaaaaaaaaaa

SEQ ID NO: 13372 - protein, 195 aa, Homo sapiens
  ref <308>: DATABASE ACCESSION NUMBER: Refseq / NP_006658
  ref <309>: DATABASE ENTRY DATE: 2001-07-26
MAAEDVVATGADPSDLESGGLLHEIFTSPLNLLLLGLCIFLLYKIVRGDQPAASGDSDDDEPPPLPRLKRRDFTPAELRRFDGVQDPRILMAINGKVFDVTKGRKFYGPEGPYGVFAGRDASRGLATFCLDKEALKDEYDDLSDLTAAQQETLSDWESQFTFKYHHVGKLLKEGEEPTVYSDEEEPKDESARKND

SEQ ID NO: 13373 - DNA, 246 bp, Rattus norvegicus
  ref <308>: DATABASE ACCESSION NUMBER: EMBL / AI013795
  ref <309>: DATABASE ENTRY DATE: 2000-03-03
ccagacaagtgaaagaggttcatgccgaaaaggtcgttctcatcacaaagtagcccatctgataccattgaaatggaggcaggagccctgattggctctgagccttggtaagcatgttagcatttcctaaattgcatttacctctcaggtcagaaatgattaaattttaggggttggggatttagctcattggcagagcgcctgcctaggaagcgcaaggccctgggttcggtccccagctccggg

SEQ ID NO: 13374 - protein, 668 aa, Rattus norvegicus; identical to SEQ ID NO: 12988
  ref <308>: DATABASE ACCESSION NUMBER: Refseq / NP_073204
  ref <309>: DATABASE ENTRY DATE: 2001-01-11

SEQ ID NO: 13375 - DNA, 2983 bp, Homo sapiens; identical to SEQ ID NO: 12989
  ref <308>: DATABASE ACCESSION NUMBER: Refseq / NM_003241
  ref <309>: DATABASE ENTRY DATE: 2000-10-31

SEQ ID NO: 13376 - protein, 684 aa, Homo sapiens; identical to SEQ ID NO: 12990
  ref <308>: DATABASE ACCESSION NUMBER: Refseq / NP_003232
  ref <309>: DATABASE ENTRY DATE: 2000-10-31

SEQ ID NO: 13377 - DNA, 422 bp, Rattus norvegicus
  ref <308>: DATABASE ACCESSION NUMBER: EMBL / AI045558
  ref <309>: DATABASE ENTRY DATE: 2000-03-03
cggccgcagctctgcggggcggctggtgccgctgtccgcggaggtgcctaggcagcggaatacaatttctctccagtcacaacctaccccgtggtggttcaagctaccagataagccggccaggaggagagctgatgctgactaaatcttattcttctgggagcagaaaagggtttttgtcaggcttgctagataacatcaaacaagaattagccaaaaacaaagagatgaaagaaagtataaagaagttccgagatgaggccaagaaactagaagagtcggatgcccttcaggaagccagaagaaaatataaaaccatcgaatcagaaactgtgcgaactagtgaagcaataaagaagaagctcggagaattgacaggcacagtgaaggagagtcttgatgaagtcagtaagagtgacctt

SEQ ID NO: 13378 - DNA, 1469 bp, Homo sapiens
  misc_feature (1)..(1469): n=a, c, g or t
  ref <308>: DATABASE ACCESSION NUMBER: EMBL / AF041254
  ref <309>: DATABASE ENTRY DATE: 2000-03-03
cgccgcgagaaggtcacacgattctccaacatggcggcggcggccctgcggagtggctggtgccgctgtccacggagatgcctcggcagtggaatccaatttctttccagccacaacctaccccatgggtcgacctatcagatgcgccggccgggcggagagctgccactgtccaaatcatattcttctggaaacagaaaaggctttctgtccggcttgctagataatgtcaaacaagaattagccaaaaacaaagaaatgaaagaaagtataaaaaaattccgtgacgaggccagaaggctagaagaatcagacgtgctccaggaggccagaaggaaatacaaaaccatcgagtcagaaaccgtgcggacgagcgaggtgctacggaagaagcttggggagctgacgggcaccgtgaaggagagccttcacgaagtcagtaaaagtgatctcggccggaaaatcaaggagggcgtggaggaagcagccaagacggccaagcagtcggccgagtcggtatccaaaggcggggagaagctgggcaggacagcggccttcagagccctctcccagggggtggagtccgtgaagaaggcaattgacgacagcgtnctgggacagaccgggccctaccggaggccccagcgactccggaagagaacggagtttgcgggagataagttcaaggaggagaaagtgtttgaggccaacgaggaggccctgggggtcgtgctgcacaaggactccaagtggtaccagcagtggaaggacttcaaggagaacaacgtggtgtttaaccggttcttcgagatgaagatgaagtatgacgaaagcgacaacgcgttcatccgggcatcccgggcccttacggacaaggtcaccgacttgctggggggcctgttctccaagacagagatgtcggaggtgctcacggagatcctccgggtggacccggcctttgacaaggaccggtttctgaaacagtgcgagaacgacatcatccccaatgtcctggaggccatgatttctggagagcttgacattctcaaagactggtgctatgaagctacttacagccagctggcccaccccatccagcaggccaaggcactgggtctccagttccattctcgcatcctagacattgacaacgtcgacctggccatgggaaagatgatggagcaggggccggtgctgatcatcaccttccaggcacagctggtgatggtggtcaggaaccccaaaggcgaggtggtggagggtgacccggacaaggtgctgcggatgctgtacgtgtgggcgctctgccgagaccaggacgagctcaacccctacgcggcctggcggctcctggacatctcggcctcaagcaccgagcagattctctgaagtgtggtgccgganccaggtagccccggcctgggtcaatcaaggcacagaggcaccgcaacaccacctgcggcaacttc

SEQ ID NO: 13379 - protein, 452 aa, Homo sapiens
  ref <308>: DATABASE ACCESSION NUMBER: SWISS-Prot / O43615
  ref <309>: DATABASE ENTRY DATE: 2002-06-15
MAAAALRSGWCRCPRRCLGSGIQFLSSHNLPHGSTYQMRRPGGELPLSKSYSSGNRKGFLSGLLDNVKQELAKNKEMKESIKKFRDEARRLEESDVLQEARRKYKTIESETVRTSEVLRKKLGELTGTVKESLHEVSKSDLGRKIKEGVEEAAKTAKQSAESVSKGGEKLGRTAAFRALSQGVESVKKAIDDSVLGQTGPYRRPQRLRKRTEFAGDKFKEEKVFEANEEALGVVLHKDSKWYQQWKDFKENNVVFNRFFEMKMKYDESDNAFIRASRALTDKVTDLLGGLFSKTEMSEVLTEILRVDPAFDKDRFLKQCENDIIPNVLEAMISGELDILKDWCYEATYSQLAHPIQQAKALGLQFHSRILDIDNVDLAMGKMMEQGPVLIITFQAQLVMVVRNPKGEVVEGDPDKVLRMLYVWALCRDQDELNPYAAWRLLDISASSTEQIL

SEQ ID NO: 13380 - DNA, 422 bp, Rattus norvegicus; identical to SEQ ID NO: 13377
  ref <308>: DATABASE ACCESSION NUMBER: EMBL / AI045558
  ref <309>: DATABASE ENTRY DATE: 2000-03-03

SEQ ID NO: 13381 - DNA, 1464 bp, Homo sapiens
  ref <308>: DATABASE ACCESSION NUMBER: Refseq / XM_049282
  ref <309>: DATABASE ENTRY DATE: 2002-08-01
cgccgcgagaaggtcacacgattctccaacatggcggcggcggccctgcggagtggctggtgccgctgtccacggagatgcctcggcagtggaatccaatttctttccagccacaacctaccccatgggtcgacctatcagatgcgccggccgggcggagagctgccactgtccaaatcatattcttctggaaacagaaaaggctttctgtccggcttgctagataatgtcaaacaagaattagccaaaaacaaagaaatgaaagaaagtataaaaaaattccgtgacgaggccagaaggctagaagaatcagacgtgctccaggaggccagaaggaaatacaaaaccatcgagtcagaaaccgtgcggacgagcgaggtgctacggaagaagcttggggagctgacgggcaccgtgaaggagagccttcacgaagtcagtaaaagtgatctcggccggaaaatcaaggagggcgtggaggaagcagccaagacggccaagcagtcggccgagtcggtatccaaaggcggggagaagctgggcaggacagcggccttcagagccctctcccagggggtggagtccgtgaagaaggaaattgacgacagcgtcctgggacagaccgggccctaccggaggccccagcgactccggaagagaacggagtttgcgggagataagttcaaggaggagaaagtgtttgagccaaacgaggaggccctgggggtcgtgctgcacaaggactccaagtggtaccagcagtggaaggacttcaaggagaacaacgtggtgtttaaccggttcttcgagatgaagatgaagtatgacgaaagcgacaacgcgttcatccgggcatcccgggcccttacggacaaggtcaccgacttgctggggggcctgttctccaagacagagatgtcggaggtgctcacggagatcctccgggtggacccggcctttgacaaggaccggtttctgaaacagtgcgagaacgacatcatccccaatgtcctggaggccatgatttctggagagcttgacattctcaaagactggtgctatgaagctacttacagccagctggcccaccccatccagcaggccaaggcactgggtctccagttccattctcgcatcctagacattgacaacgtcgacctggccatgggcaagatgatggagcaggggccggtgctgatcatcaccttccaggcacagctggtgatggtggtcaggaaccccaaaggcgaggtggtggagggtgacccggacaaggtgctgcggatgctgtacgtgtgggcgctctgccgagaccaggacgagctcaacccctacgcggcctggcggctcctggacatctcggcctccagcaccgagcagattctctgagtgtggtgccggagccaggtagccccggcctgggtcatcaggcacagaggcaccgcaacaccacctgcggcaact

SEQ ID NO: 13382 - protein, 452 aa, Homo sapiens
  ref <308>: DATABASE ACCESSION NUMBER: Refseq / XP_049282
  ref <309>: DATABASE ENTRY DATE: 2002-08-01
MAAAALRSGWCRCPRRCLGSGIQFLSSHNLPHGSTYQMRRPGGELPLSKSYSSGNRKGFLSGLLDNVKQELAKNKEMKESIKKFRDEARRLEESDVLQEARRKYKTIESETVRTSEVLRKKLGELTGTVKESLHEVSKSDLGRKIKEGVEEAAKTAKQSAESVSKGGEKLGRTAAFRALSQGVESVKKEIDDSVLGQTGPYRRPQRLRKRTEFAGDKFKEEKVFEPNEEALGVVLHKDSKWYQQWKDFKENNVVFNRFFEMKMKYDESDNAFIRASRALTDKVTDLLGGLFSKTEMSEVLTEILRVDPAFDKDRFLKQCENDIIPNVLEAMISGELDILKDWCYEATYSQLAHPIQQAKALGLQFHSRILDIDNVDLAMGKMMEQGPVLIITFQAQLVMVVRNPKGEVVEGDPDKVLRMLYVWALCRDQDELNPYAAWRLLDISASSTEQIL

SEQ ID NO: 13383 - DNA, 432 bp, Rattus norvegicus
  ref <308>: DATABASE ACCESSION NUMBER: EMBL / AI045858
  ref <309>: DATABASE ENTRY DATE: 2000-03-03
tttttttttttttttttgagaaaagccagcataaagcacttttattgcaataataaaacttgaaccgcatatgtagtgcacaggcaagggacaaaagaaacccactgttcatcagagtagcaacggtagcagacacggatgatcaccggataaaagttcactttgatggctggagcagttgctatgactactggattgacgcagactctccggatattcaccctgtaggctggtgttccaagaccggacaccctcttcaagctccgctaaaccctgcacaattaatggaaccgtcacaaactgggggctgtccaaccctaagctgtaagggagttggtcattttaaaaaatctaggtacctgggcactcacaatggtgccaactgtccctattcagaaatcaacttgagtaaagaccgcatcttccccgacc

SEQ ID NO: 13384 - DNA, 4042 bp, Homo sapiens
  ref <308>: DATABASE ACCESSION NUMBER: Refseq / XM_027074
  ref <309>: DATABASE ENTRY DATE: 2002-08-01
gttaaaaaataaatcatgactgaatctgcctctagcacaagtggtcaagagtttgatgtgttcagtgttatggactggaaagatggagtgggcacgttaccaggaagtgacttaaagtttcgggtaaatgagtttggagccctggaagttattacagatgagaatgagatggaaaatgttaaaaaagcaactgctaccaccacttggatggtaccaactgctcaagaagccccgacctctcccccgagctccaggcccgtatttccacctgcctactggacatctccacctggatgtcccacagtcttttcagagaagactgggatgcctttcaggttgaaggatccagtgaaagtagaagggcttcagttctgtgagaactgttgtcagtatggcaacgtagatgagtgtctttctggaggaaactattgcagccagaattgtgctcggcacatcaaagataaagatcagaaggaagaaagggacgtagaagaagacaatgaggaagaagatcctaagtgtagtcggaagaaaaaaccaaaattatctctgaaagctgacaccaaggaggatggagaagagagagatgatgaaatggagaacaaacaagatgtaagaatcctgaggggttcgcagagagcacggaggaaaagacgaggggattcggctgtactaaagcagggtttgcctcctaaaggaaagaaagcgtggtgctgggcatcctacctggaagaggagaaagcggtggcagtgccggcgaagctgttcaaggagcatcaatcctttccatataacaaaaatggattcaaagttggcatgaaattagaaggcgtggatcctgagcatcagtctgtgtactgtgtcctcaccgtcgcggaggtttgtggataccggataaagcttcactttgatgggtattctgattgctatgacttctgggtgaatgcagacgctctggatatccacccagttgggtggtgtgagaaaaccggccacaaactccatcctccaaaagggtataaagaagaagaattcaattggcagacctatcttaagacatgtaaagctcaagctgctcctaagtcattatttgaaaatcagaatataacagtgatcccatcgggctttcgagttggtatgaagcttgaggcagtagacaaaaagaatccctcattcatctgtgttgctacggtaacagatatggtggacaatcgtttcctggtacattttgacaactgggatgagagctatgactattggtgtgaagcatcaagtccacatattcatccagttggttggtgtaaggaacatagaagaacccttattactccaccaggttatccaaatgtgaaacatttttcttgggataaatacttagaagaaaccaattctttacctgctcctgcaagagctttcaaagtgaaacctcctcatggattccagaaaaaaatgaagcttgaggttgtagacaaaaggaaccctatgtttattagagtagcaactgtggcagacacagatgatcaccgggtaaaagttcactttgatggctggaacaattgctatgattactggatagatgcagattctcctgatattcaccctgtaggctggtgttcaaaaacaggacatccccttcagcctcctttgagccccttagaattaatggaagcttcagaacatggtggatgctcaaccccgggatgtaaagggattggccatttcaagagagcgagacatctgggccctcacagtgctgccaactgtccctattcagaaatcaatttgaataaagaccgtatttttccagaccgcttaagtggtgagatgcctccggctagtccgtcatttccaagaaataaaaggacagatgcaaatgaaagctcttcttcccctgaaatcagagaccagcatgctgatgatgtcaaagaagactttgaagagagaacagaaagtgaaatgagaacatcacatgaagccagaggtgcccgggaagaacccaccgtccagcaggcacagcgtcggtcagctgtctttctgtcctttaagtccccaattccatgtctgcccttgcgctgggagcagcaaagcaaacttcttccaactgtcgcaggaatccctgccagtaaagtttccaaatggagcacagacgaggtgtcagaatttatacagagcttacctgggtgtgaagaacatggaaaggtatttaaagatgaacaaattgatggagaagcatttctacttatgactcaaacagacattgttaaaattatgagcattaaactgggccctgctctcaaaattttcaattccatcctgatgttcaaagctgcagagaagaattctcacaatgaactttgaagatggtgaattctgaataccatcagcattctgctttaaagctcatgttttattcaaagcacaaggacggttataactcctaagtgagaagtctccaaaactcaaaagagcaacactatcggattatttatattactcaagagacaatatatatgaattcttatgaaagtgcttgagcttttaaccaggtactgtctaacaacagtcatcttttggttctgttcactgagctaaatttatctttgtaaatctttttgagtctggggggtggggggaaggggggcttcattaattatttatggtaatggggggcagagtaagaacttttggcattttgtaaacattgttgaattctctttcatgtacactgtttctttttcaatactttcagaaacctttttatataatcaaatttcaatttaaaccaaattagtcgaaacctggctaagtttagccagtaggactgttatctgtattgttaattttgtgccatattttgaattgcaacattatgctaagtataactttgcaagtcatgatattgcctaactgcttgtcataattgtcagggctgaatagttgtaagaatgacttttctttgaatcagtatttttccttttgcacgcattatgaaatgttaaacaaattacttttcaccagcatctttactataattaccaaaaacatgtatataaaagaatgaaattgaaaaataaaatatataaacataaataaattaggtagtgtattttgagtggcatcagtctcactcatcttggtgccccggtgtttacaagagccagatggtgtcagaggagtacgcagttgtatgcagttatggttggggggaatgtttgtgagggtcttgaactatttatgagatgatcttgagcttctaattttcattgatgaaattgtggtggtttacagagactaagagctcattctgtcaacagaaacactaatctgtacagagcgctgtctcaggtcatgcattgtcctccaaacccaaaggtttttttcagggttggctagagagcgagtattgtgattttgctgaaaagacaaggtgtgaaggagcaacttcagttgacacaaaatttgaaatgctcacagatcagggaggtgatttcccaaagtaattgcccaagaacctccgttttggaaggattcctttttctgtagaatactttgcctcgatatataagcatacagatgcactttaaatgaaaacccttgattataaattgatagctggtagtgtttcttttgcaagaatgcatttctaaggcaaaaggtaaattattttgtccgtcttttgatgtactttctgattccaggattggatatttattcaaggactattttaaaaatagaaagtaagtttgtagcatgctgtctgaattctggggtaagttccacctcttctttagttgctttcgttttttatgatgtaggacttcctttgatatccctgttggaagtccattagcagtcctttgcatttgccaattcaaggtaaaacagggtcagtgacatctgcagtgtcccagtcatttatttgcatgaatctgcttaaataagttttttgttgctgttttttcttttttatgttttgttcagaatttgtacattcaagttgtacttgttatatctgacatgaatgaaataaaatcttaattac

SEQ ID NO: 13385 - protein, 780 aa, Homo sapiens
  ref <308>: DATABASE ACCESSION NUMBER: Refseq / XP_027074
  ref <309>: DATABASE ENTRY DATE: 2002-08-01
MTESASSTSGQEFDVFSVMDWKDGVGTLPGSDLKFRVNEFGALEVITDENEMENVKKATATTTWMVPTAQEAPTSPPSSRPVFPPAYWTSPPGCPTVFSEKTGMPFRLKDPVKVEGLQFCENCCQYGNVDECLSGGNYCSQNCARHIKDKDQKEERDVEEDNEEEDPKCSRKKKPKLSLKADTKEDGEERDDEMENKQDVRILRGSQRARRKRRGDSAVLKQGLPPKGKKAWCWASYLEEEKAVAVPAKLFKEHQSFPYNKNGFKVGMKLEGVDPEHQSVYCVLTVAEVCGYRIKLHFDGYSDCYDFWVNADALDIHPVGWCEKTGHKLHPPKGYKEEEFNWQTYLKTCKAQAAPKSLFENQNITVIPSGFRVGMKLEAVDKKNPSFICVATVTDMVDNRFLVHFDNWDESYDYWCEASSPHIHPVGWCKEHRRTLITPPGYPNVKHFSWDKYLEETNSLPAPARAFKVKPPHGFQKKMKLEVVDKRNPMFIRVATVADTDDHRVKVHFDGWNNCYDYWIDADSPDIHPVGWCSKTGHPLQPPLSPLELMEASEHGGCSTPGCKGIGHFKRARHLGPHSAANCPYSEINLNKDRIFPDRLSGEMPPASPSFPRNKRTDANESSSSPEIRDQHADDVKEDFEERTESEMRTSHEARGAREEPTVQQAQRRSAVFLSFKSPIPCLPLRWEQQSKLLPTVAGIPASKVSKWSTDEVSEFIQSLPGCEEHGKVFKDEQIDGEAFLLMTQTDIVKIMSIKLGPALKIFNSILMFKAAEKNSHNEL

SEQ ID NO: 13386 - DNA, 432 bp, Rattus norvegicus; identical to SEQ ID NO: 13383
  ref <308>: DATABASE ACCESSION NUMBER: EMBL / AI045858
  ref <309>: DATABASE ENTRY DATE: 2000-03-03

SEQ ID NO: 13387 - DNA, 4042 bp, Homo sapiens; identical to SEQ ID NO: 13384
  ref <308>: DATABASE ACCESSION NUMBER: Refseq / XM_027074
  ref <309>: DATABASE ENTRY DATE: 2002-08-01

SEQ ID NO: 13388 - protein, 780 aa, Homo sapiens; identical to SEQ ID NO: 13385
  ref <308>: DATABASE ACCESSION NUMBER: Refseq / XP_027074
  ref <309>: DATABASE ENTRY DATE: 2002-08-01

SEQ ID NO: 13389 - DNA, 427 bp, Rattus norvegicus
  ref <308>: DATABASE ACCESSION NUMBER: EMBL / AI071511
  ref <309>: DATABASE ENTRY DATE: 2000-03-03
ctgccgcccgccgacatgatcgcggcggctcctctccgcgacccgctgggccggaacacctcaggcccttgaccatcaggcctccatccacagatctcttggaaagaacgtggtcctggatggggtccacaaacttaaacacatgcgaggtgccaaactgcagtctcatgccactctgtagcattgtggtctctgagatgcgctgaccatccacataggtctctgcatccatacttctgggtgtcacagtgaccactccatccatgttggtgagatcacagtgatggggctgaattccaggaccaaacagctgaatagaattgtcatcgaacttctctgtcccaacttcagtcacacttaactgaatgcggtataactttggcttgtctctggagtcagagccatctgggctgagctctactaagta

SEQ ID NO: 13390 - DNA, 31737 bp, Homo sapiens
  ref <308>: DATABASE ACCESSION NUMBER: EMBL / AB011399
  ref <309>: DATABASE ENTRY DATE: 1998-08-25
gaattctttaattgtctgcaaaagaggaaatccagttggtggagagaaaaattatttccacattggaaaaaaaagtaatgacaaaaataaaaaggctttgtcaaatatagttcactcttctcattacttgccttagtgtttcaaagataaacgctttttgttacaacacatcacagataacgcaacttcgcctgactgaacccggcgtggggagactgcagagatggcgctctgcagccaaaacaaagggtgggggaggggaggggcaattacaaaaaagacaccttatgaaaaaaaatccctacaattcacaaagcttgctactgaaattaatttcaggtttccacgtccacggggacacgtacaggatttaaaatgacgatcacgtggcatctctcagggccaaatggggcgcatcaaagcttcccctcgacgtttattaactctgcagtccgttctctacgtctgcgaagaattggcagataacgatgtgtctgagagaagaggcgttttctaaggagacacacaaagggagtgggaccctccaacctcactctgtgagaggaacaccgcacagcagtgtgggggctcgaacaccccaagagcggcagagcgcggttcagaaaacatgacccttgaaatgcacacaaagcctaacaacgtgtcctccgcggaagaaaacagcttgaaaaggtcggctttgaagtgacccagcggaaaggaatcaccctggaagaaacacgcagcagccccggggcaatgcgcgggcaggaggagcagcgagcgcggggagcgcagggccctttggagagggcgctccaccggccctgcgctccgtacctgtgccgccacgcccaccggtcccctgctgagcctagcaccgcccatttagacccagcaccacccgtccggaccgaacctagcaccgcccgtccggacccagcagcgcccatttggatactgcaccgcccgtccagacccagaaccgcccgtccggacccagtaccacccatcggacccagcgccgcccatttagacccagcaccgccagtccgaaccgaacctagcaccgcccatgggacccatcgcccgttcggacccagcaccgcccgtccagatccagcactgcacccccatttggatccagcaccgcccgtccagacccggacccgccagtccggaccgaacccagcaccgcccatcggatccggcgccgcccatttagacctagcaccacccatccgaaccgaacctagcaccgcccatcggacccaccgcccgtctggacccagcaccgcccgtctggaaccagcaccgcccgtccacagatccatcaccacccatttggacccagcaccgcccgtccccgcccgtccggaccgaacgcagcaccgcccatcggacccagcagcgcccatttagacctagcaccgcccgtccgaaccgaacatagcaccgcccatcggacccatcaccgcccgtccagatccagcaccgcccatttggatccagcaccgcccgtccggactctgcaccgcgcgtccggacccaacacagcaccacccatcggacccagcactgcccatttagatccagcagcgcgcgtccgaaccgaacctagcaccgctggtcgggaaggaacccggtaccgccggttgggacccaccaccgccagtccagacggaaccctagcaccgcgcggggcccgccctccgacacctccctccctggcggccgcggcagcagcacctagtggagcggcccggaggtgcggcggcgccgcgcggggcggcggcgcgcacggcgggcggcggcgcgcacggcggcgggcggggcgcgggcgggtgcgggcggcgggcggcgggcgccgggcgcacaccggccggcggggctgaggcggcgcggcgcggcgcggactgagccccaggcggaggccaagtcggaggacgcggcgcggccgcggaggcggaggcagccgcggaggcggaggcggccggcggggggtggcgaggggcgccgggcccccgcggacctgtcgtcctcggcccgtcctccggccccggccccgcgcggctgaggaggcgcggccaggaccatgtcggcgggcggccgtgacgaggagcggcggaagctggccgacatcatccaccactggaacgccaaccggctggacctgttcgagatcagccagccgaccgaggtgagcaccgccgggcgcggggcctgcgcgacccccgcccgctgcgccgcgccccgcccctcccccccgccgccgcccgccagccgcggacccgccctcctttccccctccccccctccgccccttctctcccctccccctcccccaggcccaccgcgggccccggcgtcccccgcagcccccgtccccctgccgcggtgtatcccggggtcgcgcgggccgagcgggggctggcggggcgcggcagtcacttgttcccctctccggccgctcacctggtggctcacctgggccgccgcccccacccccgcgagcgcggcgcggccccggcctcatccccggcggcgcggggggcgcggcggcgcgcggggccggcgccctccacctgcagcccggttgtggctcgcggcgccccttcgccgtggccgggatggagcctgtgacgcgcgctgtgcttcgggttcataaacttgcaggctgccagctgggaggggaaagtcagtatcacaaagttcgggaggtgcgggctgcctgatggcacaggcccggagtcggacgcctccgaggaaaggcgcgccttctccaccttcggggccgcgaggaagggccctctgcggcggcctctgcccggagggaggcgccggccccaggctggctccctgagaggaggaggaaatcacgctcgctcctggcctggtaacaatgggggttgtttatagcaaagctgctgaaagcgttccgagcagcttttaaaaaaatgtttgagtccaagtccactaggaagggctccgtggagaggggagggaggtgaagggtcggggagcaaccctgtaaatcgtccgcaagggtcggttccgcgctctgttcattcggtggctgcacagactttaccagcataaaaaaatttcactcaatatttgtgcccgtttaggaaatcattttaatagcgtctatttttgatttgttgtaataggtaatttatagttaatacttgctataaaatactagctcctaggcaacaaaacatgtttggcagatttgaacattcttacgaaatgtaatccttttatcattaaattccactttatgtttttgagagaatttgactattgcttctctgatttcttgagtttttgccagtcatgggaaggactctatttcttctgttttcatctgtacctgtgactgcacttgacgtgggtagctagccatttgtcttaatactgagttgaatactgacacacgccattaggctcaggttgtcaatttgagcatagatgttatgttaagttactcctgattcattcatcttctgtaatgattttatgagttaggttctagtaagggagttagtactatgtacttaagtgttcgttcatagactagtgtatctttagaaaggtgacatgataatttagtttcaggattatgttttcttttagaataatgaattcatttttctttttatcacaaggtaaaaaaagttgaccataaaacattttcttggtgtgtagctttttttttttgtttgaatggattttttttttttttgagagatttctcaagtctggtggaaaggaatcttttttcggtttaataaagagaattcagctttttgggattttgaattgagttagcattaaaaaaatctcaaatcagaaacattatagttcattgatttaattaaattctattttaagcactcaattgaaactttttatttcttagtgatatgactagtttttaaaattggcctgtcatttggaaagctgttttttcagttatactgtaggtgaaagtttgctttgtacatacactgaagcaaaacaagaattgaaggacttggaaaaaaagatgatatatttcatttcctaatttttctccctacttatatctgaacatttccatttttagaaattattcttcagaattgtattagaagcctttcataatgaaatgaatggtttttaagaatgtccatatattggttttttagcttttttactatatagtggctggctcacatttctattttgttttctcgagaactttcctgtactattaaatttattctggtcctagttaagctttgcatttaacatattgtatcttttattatgatgtaggtaaacttaatatgagtaattctctcagccagtatttcaaggccaacagtttcaatttgctttgtctaagctcgtgtgaatttttttttttaaccatctaatgattatttttactctatttggccatcacaagtccaattttttagttttctgcaagaacagaagcattgtactggtccttatcagatgttcagtagatgttgaacaaattcactgcaggagttgatttgtagaaataagatttaagccttgtatttatttacttgggtaatctttttatgtgtatgagagtatagttgtgggttttcttttgttgttttttttttgggtacagtgataagtatctgttttcaaattttataacttcattaatcatctatgattggtggtttcaggcagctttgataaccactgataattttgtggtttctgtgtttaggaagatgataaacttggttctttggattacattctttttttaagaaaactagagtatgttttaacatcatcctggctaagtttgctttttcctttgtattcacatttgtgggtaaaggaagggcttacaaagaataagcaggctatcactggagtatttttcaggctctttgtcacttggatcctagattcatttggaatttgtaaaatgagagttgatctgaacctgatgttgttattttataaccaggagattgatgctaagctgacttaatgtcttgattactatgaaaagctgtagctcacagaaactccttaaagtatgtatagtccctcctttgcttatttttaatgttacagcttgttttcttttagggattcctggataattatggcagcagagtccttttaatctttcctgtcacctccttagaagagggcttctctggttatccaaaggtctccctgttggttttaacttaccagacttgtcattgtcattggtatgtctgtctccctcttattacacgaaggcaagagtgtagaattttcttggataattgttctgtatcttgcatggtaggagctcaataaatattgtgtggaaagaatgttgaatatggccttcattgtatatacctttattcatgacaaaatatggcatatatgctttctaaaaatgtagtgaagagtgtttattaggccagtgagtatttatgttttcatgtcttattcttagttttgcaagaagcttacacttaaatgcagaaattatgctaggtaattgactatttagcttcacgagatacttcttaaagtcatttattttttattggatttattgcctccttcttgccctgatggtaaaaataacccagaatttatgtggacacctacatatgctttattacaggtgaatacattacattttaatactctgattaatcgagaagtaatgtggtgattcatgttttctggagatgtgtgtaagaaataactttgtcagcagaggtggagtaggaagtcttcaggtgaagtggtaataattgcataacttatagctacatctatattccagactaatattagcttgtgactatgctttatcatacaactgaactatatttgaaacttttttttttttttttttttttttttgagtcagagtctcactctcttgcccaggctggagtgcagtggcacgatctcagctcattacaacctctaccttccaggttcaagtgattcttgtgcctcagctacctgagtagctgggattacaagcatgtgccacaacatctggctagcttttgtatttttagtagagacggggttttgccatgttggccaggctggtcttgaactcctggcctcaggtgatctgcctggcctcccaaagtcctgggattacaggcatgagccactgtgcctggctgtcaatagttgtatttttaaatattggtactgctgaagatctgtttctggtgactgatgttttaatgagatggatgattgccaatgatgtatttttagtatttataggcatccctattttttatttttgataagttgaatctcattggtggttataaccttttaaaaatcttttatttcctttaataactggttacgttttatgtttgattcggtgtgttcttgtaagtctgagggacagctcttatctaacagtgttgagtcatcttaagttgaaactacatctaggctagtttcaatttgctgtcttcctgccagtgaaaaataattttattttacataatttgcagacctgatggaaaataagtgttataactgtagacttttataacactatcaaactgtgattgtggttaaattaatagtggcagactagcagaagtgggtctttcatattcttgaaaaacagggatcataaatgattaggatatgataccaaattggtgagaagcttaagaaacgtttatgattgtcattaaggatttgattgagcaattgtagtgtataaagcattatttctaggtgttggttaatctggtagcatagactaatttgtttataaacagttttaccagacttgaattttggtgtaatgtcagacagtgtgtactaataagtaggatagcatttattttgatataaacatgtttctttattataaataaaatgtatatgcaggtagcagttattgaacatatgagactgaactcatttgaaaattattttcaggttagattgagtcttgatttctgctgttgttcaaatgtttgctatttctgttagttttctggctgatagtatataggatatacccattcaccttgtagatacttaagacagagatcaaatgtatctgtctgacctacatttacacttgtaagttggatactgagcagtgtgccaaatcccacagaccctttaaccagttctgggcatgtcggagttggctaacgctgatgtgctgatagggcctgaaaaatctaccggtgggcttccagttcgtgtctctctatgtgggagttcatagcaggagtgtgcgtgttctaagaattgtaccgtctttgttaatgagtagaagatttttctgaacatttctcgttgtgtgtaactgggctaaagcaggctgagaggtggcaagggagatctttgcctagctgaagtcatctggttgagattttattctagcaaccataagaacataaaattcactaatcattttgacatatgtgattgaccaaaaccatattagaatttaatttagaaagtgaatgtgcttaataaagtgagaataagcatatagagaggtggttcaaatacaagcaggaaggtattttcccagtgtatttccaaaaaggataatttgaagttttatacttacaaatttatgcatgtatgtcatgagtgaaactcttttgaggaactgaaatggaatagtttactatggctggaaaagagccaaaatttttgtgcttttgctcacaagaaatttaatgttaaaattgtatggcttacagaaaataagcaatgtcaaccttggttgcacatgtttacactttgctgtgtttttaggctgaatatacacaacttgctttaccttgtaagcgtcactcctttgtagttagagtggctatgtggaaccctgtgagtacaagtgggcactattaataattataccaggacaacagccataaactggagttgtctcctttaactctaggtatgaacaggttggacttgctggcactgttttttcagtttctgcagtttcaaacttcctgaagtttattagtgcctgactgacctaggctgacaggacaagaccattttcacagaatattcagacttttttgtgggtgttttaaaaaccatcttcctcttcggtagggtggaagcaggctgaaaagtacatattgcagttgaggctagctctagtctagctctgccactgactatagtaacaacagcaggataggttgtttccaaattaggaagtcgtgccttgcctcctaaaactccacctgaaagtgcctttgattttcagaatagaagaaaggttgacccaacattatgatccgtgaaaaaaatgctcatttgtttgttgtttggggggtgttttattggctgagtggtgcagtgggctgttctattcagaatcctagcaagttctcttgcttgagttcatacatgttctattaaaggaaaatcaggcggtttctgctctttgcagacttaaaacttttggttcttccaagaatttgctttctctttattcttgtttgctcatagtggtactttccattgtggtctacttattattctagttcctgatttttttataggagaaccaacaaaaattctgtcaattttttcactgttaaccagcttttggtactgagctttgaggttgccagtttccctcctcctctttgacttcggttctgtatgttaagtagagaaaatgaaatgggagtaacaatatggtcactctcagacactatccactgttttaaaaacattgtatttttaagttttataatctcttataaacatgcttagtataaaattcatagattgaggacatatctttcaaatatgttattttaaatattgttattattatccaaataaacttctgagtgctgcagactcctagatgctcatacagtataccatgattttacataggttgcaaagaacatttgtttttcaataatatgattttacacgagctttttaatgagttattaggttacattacattacactttttacattaatttcattgggaaaaacttggaatttttttttaaattttttatttctgtaggtttttggggaacaagaggtatatggttacttgagtaagttctttagtggtgatttgtgagattttagtgcatccatcaccctagcagtgtacactgaacccagttagtagtcttttatctctcatcctcttcccacccttttccccgagtccccgaagtccattgtgtcattcttaggcctttgtatcctcataagtgctcgcacttaggagcgagaacatatgtttggttttccattcttgagttacttcacttagaatatagtctccagtcccatccaggttgctgtgaatgccattaattggaatgatttttgttgttgttgttgtttcggttttttttttttttttttttttcgaaaggtataaaacgtgatagatggaacactggactacatcttgaataacaagtcacggtgcatcacaccatgaaaacacccctcctgccacccatggaacgattctttttaagaggcattgggaataaaaccagttgtgtcaaggattctagtttgaacttactttattttcatttctgctgtcctcctttggaagattcttttaaatacttttcatactctatacagtggcttatccctgtaatcccagcagtttgggaggccaaggcaggagtattgcttgagcccaaaagtttgtgaccagtctgggcaacacagtgaggtcccgtctctaccaaaatttaaaaaaaaattaacaagcagggtggcacatacctgtgttcccagcttcttgggaggctgaggcaggacgattgcttgagcccaggaggtcaaggctgcagtgacctatgaaggagccactgcactgcactgcagcctgggtgacagagtgagaccccatctcaaaaaagaaaaacatttgtctgccttgcactttgaatggttcttttactcacgtgtgattttcttccctcttgttgattattaggaaaatattgattcactgagttatgcagatctactaaatgttgataaatttccttaaacaataacaaaatgttaacctttgttaatatcaccactgatctcatcagaaaaattgtaagtatagggaagctctcaaactctcagtagtggatacaagtttttaaaaaattttcatttcagagctcaaattttattattgacatcactgtcataggcagcacttgaagagataagcttgcgttattcatttttgacaaaatgtctgtcaaatatctaagcctaaataagcatagttgttctttcaagtaaaaaaatggtgttccatgaaagaagtgactaattcaattcacaacttaaacaattgctcatatactttttttttgagacagctgtcaagctgtggtatgcagaagggctttatgtatgcctcccattttggcacataattgaacaaagaaacgtactcaattttcaaggaaatcagtcatttttttctgttgtaccaaagacattcttaagtgaaactggctttttaaaaaagtttgcatggtagtaaaaaatacgttttgtatatagtgcattttgatgctactgccttgatttggtgctaaggtgccatcagctatactcatcattgctttgaccattcatgcaaattccaacaaaatgagaaaggctaatactgtcaaaatattactaagaaaatagttttgatctcacagatgacctgaaagggtctcagagaaccttgggggttcatggactgcagtttatgagctgctgccctagaatgtttagtgatgagttttagggctgatttaaaaaatatgtgtgttctaaggtagatattatgtggttttccaagtaaggctataatataaacgtataatatttaaaatgtaaacatagggctcattattatggaagtatacatttcaacatttattttacgcattatatattttctgtatttataaatgcctccttttaatttttagttatcagtgctaagatgcacacatttacatttttgtgacttgagaatactggccacaagctattagagtgatgaccatcaagttttattacttgaattcactcgggatgtgacctaagccacacctacttatgggacattttcaagttctacttatagatcttgtagttcagggagcagtggcgtctcatgtattcagcacaatgtggagttatgctgttgtttaatgtggcttaggccttctggcacttgtctgccccttcagtctccgtctcccaaatataaactcttgagttagccaaccatcggctgtgtaaagacgtctttttctcctactatgtttagttgtattttcccttggcttatttcctgagaaacagacacacaaacacagacagtattttatgttctaagaccaatcacgcacatatggatttttaatacttcaaaataatatgtggatatattaaaaaaatacgtgtagtaaaaacaaaatgtcagagtactgcatttatatttaagattagcatcacttaagattagttttatttctacgtagtggcaccttgttttgcacaaaatatattgtgttgttaatttatggatgagtgcaaatgcattttgagtttttaagtcaccaatttaattgttatagatagcattactaaactattatgatggtacacaatttttaaccgtttagtgcatcatgcttattagcaaacattgttttaatttatcagaacaatataatacagataaaaaattgtagttggtgaatatatgaatttgtaatgattcttttgtaaagcagctaagctttcgttgattcagaactctgccaggagtaccatggacagtgtttttactgaatttaatgtttatgacctcgaatatttaaaaatgtgtttttaatttaagattggcaaaggtgacttcagtgagttcatagtacaattaaagtggtttttgtgacaaacttgctgattttaatttataaaaaatatattttattaccttcatgacattgttagttttgagaatatgaaggacagtgaaattaagactagtaaatcaggaaaaacattaaaaaatatttatgatatggcttatttttaaagtatattcttgcaaatatgattagacatgaaggagctagtatgtttgcttcactatagtaagatacatttaaaaaatatttgcttctttccattattcaaatatgcttattttagagcatttggaaaatacaaacagaaatgaaggtaacaaattacctagtgttctgccatctgaagaaatgagttgcttttcaggctttttttttttttttaacattttattttattttggaaaaaagtttgcgtgtatgtttagctgtatctgcttattagttgtttacatctttagtactgaatcgtgtttcttaaccagccatgcatctgtcaggaatctagtttttaaagtcacctaagttattctgatagtaattgtaatacatcacatgtagtgaacacatgtgatatatacctgacattagtgtaaatgctttgtgtatgttatctttttacgttctcctgtgaggtatgtccttttgctgttcccatttctggatgaagaacccaaggcacagggagattaaataacttgcttcagggtatgcaaaactagtaagccacagagcagtgattggaacccagatcctctgactctggaaccttctcttaagcactatgtttgtaaaatccaaaaatttaaggtcactgcaatgaaaccagtgtttggaagttttataggaaaataatatccaagtagaaaatttggaatgtaattttcaggaagaaccacaggcataatgtaataaagcatctcttctgttttatttggatcatatacttatgtgcatatatatttatttcatacataaatacatgatgtattgattttcatctagactttttaaagccctattataattttatcattgtgatagtagattctgtgttttgtagccaaggtgacacatgccatattttattttgtaactatatacaaaccttgtatcttatatagcatccagaaattggaatatgaatgaggagttcagtgaagaagtcttcatagcttcactgattactttcttaggcctataggaaagaaaggaggtcaagacctacccaaggttcagatgcctttttgacagcattggctgtgacgctgcgcttgtggagatcgttgtgcctgctcatgccatctcgccatctcgctatctcgcttagtccctgtcctcttactgggcttcctcttggtgctgccttgcctgactctgctctggatgttgccctagcccttccctggtctgtgcttacaattaaacaataaacaaaatgtgtttattctgtgactcttggagactctggttctccttactgccatcactcagttaattttgtgtcataaagttttatttacacattaactagcaatttttccccagataacatttgaattttaacaatcttcgagaggttatctttattaccaacagttcctcaacatctactgaacaaatacttgcatttccaaatgaaaagggtgaatctcagacacagtggcctgttgtaccttcttacatcctacagcccatcttctctggtgatgagcctttgtttttccttcttgtaagaaacagtgaagcttggcgagtaaccctggaggaggtttctaggtaggaagttaggaatatttttctttcatgaatcatgggtgctctgaatatttgattttaagaaccacatattagcctacctgatattgtgatgagaataaactaagactactcactctgctagtgttgtaagatgcttagatgcaggtaacttcaattgctcacccattatattttccttatttctatcggtttaatgtagcgtttgcctttagattcttgtggccaatattcttgcataaaatataatttaacttcaaaaacttttttttttaaccaagtggcacccaaccatgaagtgctacctgtttataatttgtgtagctgctgaacagtagcttctgataaatcagtaatgttaacgttttattagtgtaatggcatcttagacattttattttagtatgtaattacaaatgcatgtttttgagaaacacttcagattttacattaaatgtaatggaaattattgttttcatgaactgatgcctatgaacagcaaacgtttcggaaatagttatgtgcctgtttcatgggccgagaagcatgggaaattgtttctgttgtttactttttttttttccagtaatggcttagccctattaaaattatggacatttaaacatttttcttcaattgtagggatttatatgaggataatgtacttattcattcagactggtatttattgagagcctgttaggagtcagactttgtcagagatgaaggaatgaagtaatctgtgatctcaagggaggaagtgaacaattacctaatgagcttgctgtgccttaagaagagggagcggtaactggcactgagatctggggcttgacgttgactcctagccctcccactcagtacatgtgttcctttctgtctccatttccacgttcactcattgagtggtcatccactatatgtaagttttgctgagcatgtgacacttaattgacacatggtctttttctcaaaaagctcccatttcagtatgggagataaattggggaaaaatggcagtagtatggtaaatactctatttgggtggtgggaatcaggcacatggttacagactggagtctttagatgagaaggaatattctatggggaagaggggaccggcattcctgcagcagagatgtgtcctctttgtacccattgtgtgtacacactgtactagcacagtggtgccgcgctgagcaagaggagcactgcagctgcggcagaatctcattgtggtggaagacaggcacagcaagcaagcagagtgtgttcagggctgtgaagaggggagacctggtaggtagctcatgggcggtggacctttccaggatttgtcaagtcagggaagcttaactgagttcattttaggaagtgatgtttattctgaatcctgaaaaatttgtaggaaatagctgggcaaaggggtaaggcttgagaccttatttaaaaacattcaatttggttgaatctgtgcgcagacatgtgtgaatatgcaggcccattttgtggcttgcagattgtactgttcctcgttattcactgtcctccttgtaagaggattatatggcctttgcccttttgacatcaagtttgaccatgtgactttctttggccagtgacagatacggtttctgagcagaagcttgaagtccatttcatggttctgtcattgcctttttctgtcatccgtgaatcagtgtgtcccatgctggggctcattcttgaaccatagtaccagaatgaagatgactagatcagagctccagctactcacagaatgatatgttattgtgagaaagaaatacagctttgttgttgtaagctgctaagatcttggggccatgtgttttcatagcatcatgttgtgactgagaagagtactatatgtgtgtctgtgtgtacatgcaagtgtacatactagttggtttggggctgaggagccagttgccagttatgaaaccaaaggtgtaaatcatggtcagttcttatgggccttgtaagccaagttaagaacattcaagatgaaagaacatgaggaggttgacagttcagatggacctccctggcagccgagtctgtggagtgaagggagggaagttaaaaacattcgagatgaaagaatgtgaggaagtttgcagttcagatggacctccgtggcatctgagtctgtggagtgaagggagggcacgcttggaggcggggccttcaggccttcctgcgcttgtgtctgtgagataaaggcctgaactaaggtaacagggaaggagaaaatgaaactgaaggaggtaaactggaatttggagactgacgaggagagaaaggaaagcattccagggaaaccccagttttttgcttggctactttgggtaggtgatggtgtcattaaccagaatcaaaaatgtcagtggtagattagatttgagtggggaaataaaaagttctctttgagatacaccaaatttgaggtacttgtggatttcccagaggcatcctacataggcacttaggaagagagccaggggattcagggtgattgtgtaggtagcaggtagccaaggcgtagaggagactacaaggaaaaagttgtgtgaagagagacaagaacctaggacagaaagcctgagaacaaaatatcttgtgggctggggaaggggaactggctaagtgtactggaagggaatgggcatagaagtccaatacaggaaaaaaaaaatactgtacaacgatgtcagatcaggagaggaaagtttagaaagtgtcacctactaaacttcgtcctccatgatcttgctttaaagtttgttaaattgcatttaatttaatttctactctctggtcttgcttcatagttttttcggtatcctcttaaatgccccccttcctagcattctgtaaagtttcctattctttgatcatctgtgatgtccataatatatcagttagagtgtttcaatttatgttgctaattttttttttctactactggaaacatttttatgattgttatctattttattacttcaagagccctctggattctcaccgatgcctttcttcttttgagatcccattcctctgggactttgcagctgccctttcattccttctgtcttacttcccttcctctctgtcctttcttcttacctcccattcactcatctttgggcttttctcttctgttaaaaggcactcaggttttgttttttaattaaaaaaaaaactttgctaaagttttgtaactcttcatgttttgtctcatcattcattaaacaaacatttctactccaacttactgcaggaattatccctttcccccatctactcctgactcatttaacccttgcctttcttgcttctatccccaaaacactgctagaactgcctttcttgatagccttgatttcctgattaccaaaaccagttgcccactgtgggaccataaaaggctttatttaccaccctttttttttcttggtaatgatactagcctctttctggagctattctttccttatctcccttagttgactccattttgctcatgtctcaggacagtgtgtattgtaatgctggattcttgatgttcttctactcattctctcaattaaaaaatgccccataattaactatggggccacaatcctgaggtcaaggaggcacattgataatgactctagctgacataatatacttagcatttattgacttcaaactgtgtatgcttatttagatatttaaaaatttggctggcattcctgggtcacagtatcctctgcaagatgggttgatggagagcctgatttcgtggtagctgctatttactgggctgtcttccttcctctcctccactaggatgtattatttcacatacttggtttcatctcactatgttgacatattgctttcatcacagaatctggactgcatatttctaggtgaagtaatctaggtgatgatttacctatactaaaatccagtattgattttcaattttagattggcagtcaattgagaatattgctcaggaaatgctggcttttgctgtttttcaagtcctctgccttggtggttgtctttagcatctccagtaaagttttataaaaacacatgagcttttagtcatttgctactatctgtaaataaaggtctacaaaaaaaaactaaaactatgtttgattttggtggccagtcttggaagagaggaattgaggaaatacagtagttaatgagtagtggcataggataggggaggaaaataaattgaatcctggagtttcagtaggaatcaagtgcacttgggtagctgacaaagttgggatttgacttattgctccagtattctctcttagattagcctatgtacaactattacctccacatcgtaaacttgattggtctctttgcttctagtccattctatactcaaatgttacattaatgtccccaatatttcatcacctggaggactccagactgctaaaatgcccctttagcaattcctgacctcttctccctacaatatgagaagaaaaagttgctgtagggaaatctactaaaagtcaaggatgtgacagtattcctcactgaattaagcactaagtataagagagctattttattgctaagattgatgaatgggcattagtacattgttaatgcacttaaaagggtattgcactaaacttgagctctttgaggacagagaccaggctgtgtggtcttccagaggaggacacaatgtgcacagtggataattgaagaatgcatgcattaagaaattaatgaaagttgatcggtaaggacataactgtcatacacaaactcagcacagtaaatttgaagacttttatttaaagctttgaaagtctggccccttgctgggcttgtgtagatttctttagaaataggataacttacagcaaaaatttattaaatataagtagctcattgcagatattcatgatttggtagtatattgtaagaaataatagatttattctgagaatatgctgctgcttttcacctggtactataatctgctcatataattagaaccttttgtgttaacatttcaatatctgactaaaggagaaacaccttgggatagttaggctgttgaagactaatgtaagctttttcaggtgggcagtaactgacctgttttactcaaagggaaacttaagttttatagcaagagatatggagagcttgtatttattaagatttatgtggataaaatttagttcgtgttttttgaattgagtctgtagggtaaatttgaaggtctccctttctcctctgaattctagctatccagacatagccactgtaaggaatttttacagtgtgtctttcccagttttgctcttgtagactcaaaaatgaagtgtgtgtgtgtgtgtgtgtgtgtgtgtgtgtgttttgagatgagatcttgctgtgttgctcaggctggtctcttaaatcctgggctcaagcaatcctcctgcctcccaaatagctgggattacaggaatgcaccattgtagcacagctgtatttgaattttgttttacaaaaattggatcgtaggatatacacttttctgcaacatgctttattaaagaaattctcccatatttctataaaacaaaagtatgtataaatataattatctttttagtagctgtataatccatgtagtaatcattttcttaactattaatgaacactttgactgtttccacagtacactgtttcagtaatgctgctatgaacattttatacacatatctttctatacttgggtatttccataaaatagattcctatgagtgcaatttgagtcaaaggctgtacttgttgaaaatattgatagactaccaagttattattcaaaaggtagggggccctccagtttatgctgccactgttgtgactatgaccctttacctaacactgcatattatgaattaaacttttcagtctgacaggtaaaaagtaatgtgtcattggttttaaaatttgtaattccttattcattgttgagaatgagcatccttttcttttcttttttttttttttttgttttgttttttgagacagggtctcactctgtcactcaggctggagtgcagtggcgcgatcgtagctcactgtagcctcgacctcccaggctcaaatgattctcacgtctcagcctcctgagtagctggggctacaggcatgtgcacccatgcccagctaatttttaagaaatttgtataaagatgtggtctcactatgttgcccacactggtcttgaactcttgggctcaaatggtctgcctgccttggcctcccaaaatgctgagattacagacacgagccactgcacttagcagggcatctttcatgaatgtttcttgccatctttattttctttctatgtgaagtgcctgttttttctgtcaagaaatttgttttattctcgtcaatttttatggaaaatcctttttaaataaacattttgatgttttactgtgtttataaatagtttttcctactcagtcattttggtcttctgattttatggtatttttgctattaaatgaatatttcttttcttttctttttcttttcttttcttgctttttttagacagagttttactcttgtttcccaggttggagtgcaatggcgcgatcttggctcactggcacctccacctcccaggttcaagcgattctcctgcctcagtctccctagtagctgggattacaggcagatggtatttttagtagagacagggtttcgccatgttggtcagactgctttccaactcctgacctcaggtgatccgtctgcctcggcttcccaaagtgctgggattacaggcgtgccaccacgcctgggccctaaatgaatatttcttaatactttgttttcttatttttaggggacttgaaatttaactaaaaagactgagtgagcacttattttttaaaacccaaaatatcttagtgtattagtctgtttttacactggtataaagaactacccaagactgggtaatttataaaggaaagaagtttagttgaatcagttccacatggctggggagacctcaggaaacttaacaatcatgacggagacaaaggagaagcaagcaccttcttcacaaggtggcaggagagaagtgagtgcaagcaggggaaatgccagatgcttataaaaccatcagatctccactcagtcacaagaacagcatgggggaaactgcctccatgatccaatcacttccctcccttgacataaggggattatgattcgagatgagatttgggtggggggcacacagccaaaccatatcacttgagttacagcggatagcttggaccccattccttttacatctagtaggtagcagtttatcagagcttgggcggtcttttttttccttaaatgaggttcaaatctattaaactctctgtgactggactgcgtggtatcgaaagaagccttggatgtaggtttgttaatgagatctttaaatgttgactagtttagatgttttaagttcctaatttttcatatgactacaaaaatactaaaataattttacttcagtgactttgagaagattctcaaaatgaactataggggtgtttttttctgttttggggataaatgaacataaacaaaactccccgaaaaccagtgcgtgaacttttaaaagttcaaaaataagccatgagctttgtagaaattagccttactgatagttgtaaatagttaaggttgtctgattacttaaaacttctcattaactttttatttgttgtgatgtatatttatgaaatggctttttttttcagtttatttccacaaacatcacagtaaagaaaataattgaagattgaaaaaagtataatatttaaaaaaaaaccaagttgttttttttttttttttcaatgtatcttagagaatcttctatgagatttgggggaggagtataggatgtctaggaaatggcattttcaggggagttaatctattagaaaagtcataattaaaactctgagttagtagaaatcaaatattgtttaatataattcgtcaactgaatctgcgttaagacattcaataattgtattattgttttgccagtttagttatttgattgatgcaaacctgtcatctgtacaataaaaaaatagtgaggtatgtctatactctgtcagtttgtttaattttaaagatgaaagttaaattttagaacgcttttcatttgcttttttaccgtaagtgggagcagcttttaacttcacgaaaaccactctcctcaaagtcattaaagactttcatgctgacacatccagtcgtttatcttctgatgcagcagcagttgatcacatcttccatcaaattcttccttcacttggtcttcaggactggcctgttgcccagacctcagggtctgatcccaatacacactcttttctccacttattccctaggtgaaatatttcatttttgtggttttaagtgctaatatattccaaatttacatctctaagtttggcccttgttctgaacttcagccccatatagccagtccctcatatctctatttaggtgcactctaggcatctcaaagtgagcctgtccaaaactaaactctgatttcccaccactgcactctcatcggcaccgcactctcatctgcttcttcttcagccctctcctaagtcttagtgaacagcagctcactttaccaattgctaatgtccacagcctggcattcttctggatccctttcttcctctcagaccatgatcatatctaatcttagcagcagattctgtcagctctactctcaaaatatttttataatttaaccacttttcaccatctttgcttcttactactgaattaatccaggctaacttcatatctcccaccctgggttgttccagtaacctcttacttagtcttaatttatttcccttgtctgcctttgcccccttacagtctgtttcctacacagacatacacttctaaaccttaagttaaataatgtaatgtttctattcagactccccaattttttttttaatcactcagtgtaccttgacctacaaaccttattcctaataccgttttttcactttctcattctgctatagccacaaggggcctgcttgctatttgtcagttatgccaaccaggattctgcctgggatcttagtacttgttccctgggcttagaatgttctttccctacaattaggctttgctcaagtatcctagaagtctttgttgatttaccctatgtgaaactgtgggggtagcactttggtgaaacaggagctcctccctaaatggcaagctttttgaataccttggcttgagtttattcgtaactatcatggtcacatttctttgacaacatgttccatgcctagcagtgattcaggcattacaaccagtctcttatttcatttgattcccacatcagcaaaggatatattactattatttacatttcttttagttaaatagtgtccagaaagtttaaggaattaagagttacagacatagcgaaagggttttctttctccctttctgcctcccccaagaaaactactgacgtgaaacttcatatgagtagatatagtttatttaacagctttgcattattctgttgtccgtattctatctctgtccctatccagagattaataaattgtatatacttttccacagttacaaatgtggatttaatgaacagtcttgtccatgttttcttctgtactgatgtaaaatttttaggatgaatacctagaagtggaatatttagattcagattttttaggtcctgcaaaattgatcttggaaatggttctaccaatttatattccaaacttcagtcttcaccctcctcaatatattcagatttgttgatatgctctaaagtatttgaaataataatttcaatttgttaccctgatttccgtcggtgagcatgttttcatatgttcatctagcctttacttccctttaattggatttctcttttttacagactcagctgtgtattaaacagaatgttcattttgtattattgtatagtacaatgattactgattgtttagtctgccatactgctggaactgggtgttttccacccttatttttatacagcaggatgagacgcagtgccgcatagtggttgaaagtgacttgtttcaaaattgccagagtatgaattctggcccactggtattagctctgtgaacatggtccacttacttgatcttccttaggccccgtttcttcatctgtaagacaggaacagtaataatacctaccttatggggttgttgtgaaaattggagtagataacgcataaaaagtacttattagcacaatgtttagcataaggcaggcatttatactgttgttatttgtagtgcattgtcatcattagtatttgtgggttttttctttcccttgattttatatgtttatctttgtatcatgtaatgtaacttgtggggggggagagatttccagcaacatgtttaggtttagtattgtatgttctaggttgactctgcattcttgtttgttgccgtttcttattttgtgttcaattatagctagaaatgatagtaccttcttcaaaagtatccttatatgagattttttgaacagtgtaatgttataaaacccaatcagtgatttgaggttttgtttcatggaactttacacatcttaccatattcttatcatattctgtatccctgtctttgagttcatgcctattgtgtattccattacttacctaaagaatttgtttcagaatgtactttttagaaatctatatgtgtatgtgttagcctaggatatttatttaacagtatagaagattctcaaaaacaggagttaagagtattattctagtgaacagagtgtttccataaaattaaatgagaatctacttcactgattggttcttttcaccatgattctgttttgcaaagagaattaattaagaaaacttaattgaacagtgagctggtttcattagtgtcacttttcctgtcgaggttctaggttccttttgtaagttactactgataagaatcctcctaaacagcttgacctcctttcagaagtccgtgtgctgatttacacagcttacctttttgtttttctcatgcctggtactaagtgacattccaatctgctgtagtcatttggtaatgcaaagagtgaaactggaagggtaggcaggaggtaccggttggcaccaaatatgcagttcaagatcactcatgataccagggagagaatgtcaaatacttgaaccagaacaacacattgttttagtttgtaaaattccagttataaggcagtaatagtcatgttactctacctcaaaattattttctttctcatttgttcttttcacctctgtcccaacccccctctcgctcatggatgtgttttgtgtgaaatgtgaaaggtcttaagatagtggaggcttgaaaaaactgcctgtgttttaaaatgtgcttgtgtttgtttcctaatgcagtactttgaagatattttaggtttaggtaagttgctttaagtttttttttcttaattggagtaggttgagtgctgtgaattcaatttttagtgtactataaaaagatagatggaagcactttgattataggaagtttctttgaatcatttgctatagtttgagtgtttactttaatgtgaaactcactgtaaatccaagtaaatgctgatctaccaatgttcatgtatataatttgtatggtacattatcttcatcgttcaaatttagaaccttcttattatttcacatacttaaagaagaatcttagttgcagattcaagatgaagattataaaacattttcttgggttttctttcagtattataattttgaggctgaatttaagaacatggttattttctgtagacaccaaaacattttataattttgtgtataggttgatttgggtagatcagttatatcactggaaatgatttcaactctcagaaattgtatttcaacaatataattttttattgtgtgtgtgtgtgtgtgacaaagtcttgctctgttgcccatagctggagccgatctcggctcattgcaacctctgcctcctgcaagcgattcttctgcctcctgcattcaggcgattctcctgcctcctgcattcaagcgattctcctgcctcaacctcctgctggggttacaggcacccaccaccatgcccagctaatttcaacaatagaatttgaaatatgtatagtgccattctattttttctacaaagtttgatggttttcatttttcacgtcatatatacagatctttaatatatactctgttattttttgcttttgtatttagttttgctagagataggttttttatacacatacacataaacacaaacacacacctttctttttttaacttttagggtcaggggacatctgcagggtatgcaggtttgttacctaggtaaatgtatatcataggagtttgttgtactgattattttatcaaccaggtattaagcctagtatccattagatatttttttctgatcttatttcttcttccaccctccaccctccagtgggtcccaatgtgttgttcgcctctatgcacacccaccttttcaactagttcttgtgtaagtgtaggcagttgagaatttgtagacaggaagtaatatttatcaagtgcctcatatgtggcaggttcctttatatagtgtgaatcagttagtaaccaccaaaccctgtgaaatagtagcccctccactttatagacagggaacttgagagaactcaagtgtttggcacagattcatgtgggtattaagtgaaagtaaaattaagtgggattttacccaatgtctggctgtttccaaggctctgcctcacttgctttttgtatgacacacctgttgcttgttgagtgtaagcaagctatgtttggcttctgatgttaaataattcattatccattttcagaaccaaagttcttgagtttttgtagcgcatttttaaaaaaaacaggtttactttattttgcacttaatagttggtaattataactgaattattttcatattacacattttttagcgtgaaaattttcaaacacaaatgaaactcattccctagacttcacaattttcagtttgtcgttcttaattttgttgtttttaggtgcactgttttttaaagcagatcctaaaacccgtcatgttatttcttccctacttcagtgtgcatctaacaaaaattcaaccatcatgcaataatctcattaacaaaattagccagaattctttgttattatctgttattcggtccatactgagattccctatatctctcaagaatgtggttttgcagttaatttatttgaattggaatccaaacaagggccacacattatatttacttctcctacatctcttttaatctagagcgtttatttcatgccatacactttgaaaatattgggctactttttctgtagaacatctctgttctagacttacctgtatcttttacagggtggtagtggtttgacatgtttctctagctttaaaggcttgaatggattcaggtccaattgttggacaaggctttataagcagtgctgtgtatttcatattgaatcccattagaaggtcaagtggtgacagcccctgtactgtcaagttccttatcactgtttcattcggagatctttgtctaaatcagttaatggctacaaaatggcgtttttctaattccattatttctctttacatttattggctggaattctttaaaagatatgtagacataaattctgagctcctgtattgcttattttccagagtaaggagttggttgctctagttaccttcagtgctaacattgattttgttttgttggtgttctcatttttctttggtataatgagctggtggatttttatgtattccatgtttcagtaacttgaggtcatttctgctggtattcagattgtcccaaatttgtccagctgcagtttttggttggctagagggttcttttgatatgagttagtctttgagaacttccttgttttccagcataacaagatgtcccaaactcatcttgtacattttctgacctagacctggattaagccatttctccaagtagctgtggtttcttttagtggtatttaagagactacagtctaagtgctagagatgttcatttttacagattgttgtttgcttctgggccttttcagtgggaaaaactaggaggtatttatattttgtggggagaaaaatctgtatatttctactgatgtttccaattcagaatggccttgtatggcttttacttaatttatttaattttatatctctttttctcttacattgaaaccttgtcactgtataaacacaactacctgttggctttattgtatcatatagttattattacaacatattgccagtattattactaacaacaggatatctgaatggggatttaaaaattctgcaaaattctttgcagatactgacttgtcagtagactagtctgctggcaatttaaagtcaaaagctgttgtccaaaatcactcagaaaaaaatcttttttctgtatgctaatatgaccaacttgatagagagttaagactcattcatttcagtttgttttatgttcccagcgattgtctttttttgttaaatagttacatggttccagagctgaaactgtgtgataaagtacatttagaaaagctttgcttccatcttgattatgttttggtttgttcatgcatggaaggcatctctttgaagatgtaaccaaatacaggttgtgtgtttgtgtcctgtcttttcatataatagatgcttatgacacatgctgttgtgcgttgtgcttttttcacttaactgtgtatcttatgcatcatgccatatcacagtataaagagttttgccctaactcttaatggcaccgttttattccactcagtgaatatacgagaattttttcaaccagttccctactgctggatcattttcaaacatttgcttttataaacattgccacagtgaatagcctttcgcatttcatatgtattttttttagtgtatctttggtatagatccacaagagaattgctgtttcaaaatgtacatgagtatctaattttaccaaatgttgccaaattctgcaccttgggtatatacttttttttccccttcagccccacaaaaagactggtttcaaaccttcagatttttgccaatttgggtgttgaaaaatggcattttactattagtattgtctattttaaagttgttttattgtgggtgaggttgttcatcttttgtgtattaagggccgattcactactttgtatgctgcctgaaggtttttttgggtgccatttttctattgggttattggttcgttcttcacaaattttagaaactctttatctgttaaagaaattatatttctttctgtgaaacaagttggaaatttttttcccccagtgtgttacttgtcttggtactttacctattgtgtgctttttgaattttttgtgatatcaaagttttacattgtcaaacttattaacatttctttaattgactttggatttcaagtcatggttaggaagcttttcttatttctaagttttcatggagtttatccattttttcttgtacttgtgttgtttcttttttgtatcccttgaccatttgaaatttatcttaatgtacagtgtgatgtatagatccagttttctctttgccgtctgtctgtcccaacacatttatgaagaacttcgtcttttccacactgatttgagacccacctaaaagtctagactttttctttcatttatgtcaaggtggtgttttaaatagagatttttatagtttttttaaacatctagtaggctgacccttcatatttataattcttcttttcctggattgctctggatttcttgcttattttcctcataggaaataaaatcttttaaattagcttgtttagttccaggaaaaaaagaaaaaccaacaaaaccattgtatttttagttactgttttcttaaatttataaattaagtgtgtaacttgatttttttcagaagaaaataagcaaaaggttttgttaatattacaagagaaattctgttttgaaaaacaaactgttcaatgatgatattcagtgtaatttgacttcaaatttgtcttcatgtccttgataactataattttttgttgaaattgagtttagttgacacagttttcaaggtattctagtttacttaagtatttgaagtgacatggaattcataaattaatcttttttaaaactattaaaatgaatacagttgtgataaattgtttttcgtgtgcttgacaatactgatctagttaattggacggttgaactacttgttgaaatgagccaagttgtctcctgcctccaggagtaccttggcaaatgtcttctttcttaaaatatttttaaaaattatatatcagaagataagtttaatcttacaaaacgaagtagtaagcctggccacattacttagtgaaaaaagtaggtgagttcagaatccactctgcattactgaccaaaagttaagtctttgtgaattgaacttattcttgcagtttggtcaggtccagtcacctttcttatttaatttaaaatgaggattccccccttagctagcattcattgactttgagagtactagaacagcctggtttattctagacagtaggaagatagcttatagctttaacaactgtggttgatttttctcggagctggaataacatcaggaattttagactccagtggtcacttagctacaccaaatagtgacctgaatgtttagacaagggcctgtattatttaaacctcaggattgtagtggataatacaacacttttaggggtaaaattctgctttaagcaaattgtgttcacttgtgatgcatcattacttttctgagaaatgataagtcatagtacagtagtcccacctatccactggttcactttctgaggttacagttagccaggatcaactgtggtcagaacatacgaaatggaaaatccaaaaataaacaactaatatgtttcgaattgcatgacagtttaaatagtgatgaaacctctggctgtccagctatgttccacccgggatgtgaatcatccctttgtctgtcatctccatgctgtatatgcctgttagtcacatatagctgcctcatttatcagatagactgctgcgctgccacagaacttgtgttcaagtagcgcttattttacttaagggccacaaaatgcaagaggggtgatgctgacatattgttataactgttctagtttattattgttaatctcttactgtgcttaatttataaactttattatagctttgtatgtataggagaaaaaaacctgtagtatatatagagctttgtgctagttgccatagcagacgtccagtggggtggggggtcttggaacatgttccctacagataagggggaactactatacacattatggttggaaggctttgaactagaaaagtgaagtataattctttatgtgcacatactcttaggtactattaaattggtagttaagtcttggcctactctaatttactatagtatttggctagaaattgggtaattcactcttttatagaaagaactataggtcactggatagccatgtatttgaagaaagtaacatactgatgaaatatgtagttcctactgcactgtgctaggtgcttttgtgcatactgtctcatttaattctccaccgtaacatggagaagttggtactgttatctccatttttatacaagaggtatctgaggctgaataccagacaaggctaaaacagaaacttt

SEQ ID NO: 13391 - protein, 1816 aa, Homo sapiens; identical to SEQ ID NO: 2337
  ref <308>: DATABASE ACCESSION NUMBER: SWISS-Prot / P55196
  ref <309>: DATABASE ENTRY DATE: 2002-06-15

SEQ ID NO: 13392 - DNA, 438 bp, Rattus norvegicus
  ref <308>: DATABASE ACCESSION NUMBER: EMBL / AI072089
  ref <309>: DATABASE ENTRY DATE: 2000-03-03
tttttttttttttttttgatattagttggtgaggatagccaaggttctgggaacggaagatttatatgactatattgacaagtacaacattgaattagatccacgtttcaacgatatcttgggcagacactcccgtaagcgatgggaacgctttgtccacagtgaaaaccagcaccttgtcagccccgaggccttggattttctggacaagctgctgcgatacgaccaccagtctcggctcactgcaagagaggccatggagcacccttacttctacactgtcgtgaaggaccaggctcgaatgagttcggctggcatggcagggggcagcacacctgtcagtagcgccaatatgatgtcagggatttcttcagtgccaaccccttcacccctgggacctctggcaggctcacccgtgattgctgctgccaactcact

SEQ ID NO: 13393 - DNA, 385 bp, Homo sapiens
  ref <308>: DATABASE ACCESSION NUMBER: EMBL / AB029042
  ref <309>: DATABASE ENTRY DATE: 2002-08-22
agaggtgcagctccagcagcaatggcagtgacggcgttggcggcgcggacgtggcttggcgtgtggggcgtgaggaccatgcaagcccgaggcttcggctcggatcagtccgagaatgtcgaccggggcgcgggctccatccgggaagccggtggggccttcggaaagagagagcaggctgaagaggaacgatatttccgagcacagagtagagaacaactggcagctttgaaaaaacaccatgaagaagaaatcgttcatcataagaaggagattgagcgtctgcagaaagaaattgagcgccataagcagaagatcaaaatgctaaaacatgatgattaagtgcacaccgtgtgccatagaatggcacatgtcattgcccact

SEQ ID NO: 13394 - protein, 106 aa, Homo sapiens; identical to SEQ ID NO: 1658
  ref <308>: DATABASE ACCESSION NUMBER: SWISS-Prot / Q9UII2
  ref <309>: DATABASE ENTRY DATE: 2002-06-15

SEQ ID NO: 13395 - DNA, 458 bp, Rattus norvegicus
  ref <308>: DATABASE ACCESSION NUMBER: EMBL / AI102917
  ref <309>: DATABASE ENTRY DATE: 2000-03-03
catcagactcctgcccagctgtatacactgaagcccaagcttcccatcacagttctcaacggagccccaggattcataaacctctgcgatgctttgaatgcctggcagctggtgacagagctgagaggagcagtagacattccagctgcggcgtctttcaagcacgtcagcccagcaggtgctgctgttggggttccactcagtgaggacgaagccagagtctgcatggtctatgacctctatccgaccctcacgcccctggccattgcatatgcaagagcaagaggagctgataggatgtcttcatttggtgattttgttgcattatctgatgtttgtgatgtcccaactgcaaaaattatctccagagaagtgtcagatggtattgttgccccaggatatgaggaagaggccttgaaaatactttctaaaaaaaaaaaaaaaaaaaccctcgtgcc

SEQ ID NO: 13396 - protein, 592 aa, Rattus norvegicus; identical to SEQ ID NO: 12565
  ref <308>: DATABASE ACCESSION NUMBER: Refseq / NP_112276
  ref <309>: DATABASE ENTRY DATE: 2002-11-05

SEQ ID NO: 13397 - DNA, 2068 bp, Homo sapiens; identical to SEQ ID NO: 12566
  ref <308>: DATABASE ACCESSION NUMBER: EMBL / D82348
  ref <309>: DATABASE ENTRY DATE: 1997-04-24

SEQ ID NO: 13398 - protein, 592 aa, Homo sapiens; identical to SEQ ID NO: 12567
  ref <308>: DATABASE ACCESSION NUMBER: SWISS-Prot / BAA11559
  ref <309>: DATABASE ENTRY DATE: 2002-06-15

SEQ ID NO: 13399 - DNA, 488 bp, Rattus norvegicus; identical to SEQ ID NO: 6816
  ref <308>: DATABASE ACCESSION NUMBER: EMBL / AI104389
  ref <309>: DATABASE ENTRY DATE: 2000-03-03

SEQ ID NO: 13400 - protein, 312 aa, Rattus norvegicus
  ref <308>: DATABASE ACCESSION NUMBER: SWISS-Prot / AAK01620
  ref <309>: DATABASE ENTRY DATE: 2002-10-01
MATSANLDIGAQLIVEECPSSYISGMPDIKLEHQLDPNPDEGAAQGVAMGMKFILPNRFDMNVCSRFVKSLNEEDSKNIQDQVNSDLEVASVLFKAECNIHTSPSPGIQVRHVYTPSTTKHFSPIKQSTTLTNKHRGNEVSTTPLLANSLSAHQLAAQGEMLYLATRIEQENVINHTDEEGFTPLMWAAAHGQIAVVEFLLQNGADPQLLGKGRESALSLACSKGYTDIVKMLLDCGVDVNEYDWNGGTPLLYAVHGNHVKCVKMLLENGADPTIETDSGYNSMDLAVALGYRGVQQAIESHLLKLLQNIRE

SEQ ID NO: 13401 - DNA, 488 bp, Rattus norvegicus; identical to SEQ ID NO: 6816
  ref <308>: DATABASE ACCESSION NUMBER: EMBL / AI104389
  ref <309>: DATABASE ENTRY DATE: 2000-03-03

SEQ ID NO: 13402 - protein, 262 aa, Rattus norvegicus
  ref <308>: DATABASE ACCESSION NUMBER: SWISS-Prot / 1TOH
  ref <309>: DATABASE ENTRY DATE: 2002-10-01
MKTTQYVARQPDDNGFIHYPETEHQVWNTLITRQLKVIEGRACQEYLDGIEQLGLPHERIPQLDEINRVLQATTGWRVARVPALIPFQTFFELLASQQFPVATFIRTPEELDYLQEPDIFHEIFGHCPLLTNPWFAEFTHTYGKLGLKASKEERVFLARLYWMTIEFGLVETDQGKRIYGGGILSSPKETVYSLSDEPLHQAFNPLEAMRTPYRIDILQPLYFVLPDLKRLFQLAQEDIMALVHEAMRLGLHAPLFPPKQAA

SEQ ID NO: 13403 - DNA, 111 bp, Homo sapiens
  ref <308>: DATABASE ACCESSION NUMBER: EMBL / M20912
  ref <309>: DATABASE ENTRY DATE: 2000-03-04
atgcccacccccgacgccaccaccccacaggccaagggcttccgcagggccgtgtctgagctggacgccaagcaggcagaggccatcatggtaagagggcagtccccgcgg

SEQ ID NO: 13404 - DNA, 391 bp, Rattus norvegicus
  ref <308>: DATABASE ACCESSION NUMBER: EMBL / AI104882
  ref <309>: DATABASE ENTRY DATE: 2000-03-03
cctgatctaaaattacatcacatctgatcattttcatttaaagaaaatcacttctggcaaaagaacgatgctgctggctgtggataaggccacgtccagaaatgaaaatgtgtccccagcagaggacacgccactggctaaatcttgggaaacccatgacagaggcatatagcagggccagagcccatctccacaaagtgcagacagatccctggcttcactgtcacatacccatggctgacatcatttggactgcacgggactggcagaggtgcctcaggaaactgtgtccctgtgactttctccagttctctcaaagccgaggctgtgtcgcggaccaggatggtaaccatccccatgtcacgggctggcttcagattacttccaaagt

SEQ ID NO: 13405 - protein, 554 aa, Rattus norvegicus
  ref <308>: DATABASE ACCESSION NUMBER: Refseq / NP_075225
  ref <309>: DATABASE ENTRY DATE: 2001-01-31
MALRVAAFDLDGVLALPSIAGVLRHTEEALALPRDFLLGAFQMKFPEGPTEQLMKGKITFSQWVPLMDESCRKSSKACGASLPENFSISEIFSQAMAARSINRPMLQAAAALKKKGFTTCIVTNNWLDDSDKRDILAQMMCELSQHFDFLIESCQVGMIKPEPQIYKFVLDTLKAKPNEVVFLDDFGSNLKPARDMGMVTILVRDTASALRELEKVTGTQFPEAPLPVPCSPNDVSHGYVTVKPGIRLHFVEMGSGPAICLCHGFPESWFSWRYQIPALAQAGFRVLAIDMKGYGDSSSPPEIEEYAMELLCEEMVTFLNKLGIPQAVFIGHDWAGVLVWNMALFHPERVRAVASLNTPLMPPNPEVSPMEVIRSIPVFNYQLYFQEPGVAEAELEKNMSRTFKSFFRTSDDMGLLTVNKATEMGGILVGTPEDPKVSKITTEEEIEYYIQQFKKSGFRGPLNWYRNTERNWKWSCKALGRKILVPALMVTAEKDIVLRPEMSKNMENWIPFLKRGHIEDCGHWTQIEKPAEVNQILIKWLKTEIQNPSVTSKI

SEQ ID NO: 13406 - DNA, 522 bp, Rattus norvegicus
  ref <308>: DATABASE ACCESSION NUMBER: EMBL / AI105198
  ref <309>: DATABASE ENTRY DATE: 2000-03-03
aggggtaaggaatatgatttcttaaaaaaaaaaaaaaagctcatatatgatcaggacagatgcaacttttaaaactttttctatgcacagttagcagaattggcagaggaaaggctcatgtatacagaaggccagctgctcttctgcctctcctgttgggacaagggtagtgagaaggtgagagggcatagccgactcttcccagaaaattttgggggctcctcatgcatctgcatcccctgtacccacaccatgcactcgcatactcctgtcctgatggccacaaaggctcaggacctagcatgtatttgtgcacactgcttcttaattgcaaaaaaagcccaccccgctgtggccctgagtagggacaggtacccaagggtggcacaaaatcatgtacctcaagtgacatgcatctacatgcatgcacacacactcacaaacatgctgtgcctttctactgtgggctctgtaaaaatcccgtccctcgctccaggcaatagtctggacctgcagcctaaa

SEQ ID NO: 13407 - protein, 637 aa, Rattus norvegicus
  ref <308>: DATABASE ACCESSION NUMBER: Refseq / NP_037162
  ref <309>: DATABASE ENTRY DATE: 2002-11-05
MMSYSERLGGPAVSPLPVRGRHMVHGAAFAYVPSPQVLHRIPGTTTYAISSLSPVALTEHSCPYGEVLECHDPLPAKLAQEEEQKPEPRLSQKLAQVGTKLLKVPLMLGFLYLFVCSLDVLSSAFQLAGGKVAGDIFKDNAILSNPVAGLVVGILVTVLVQSSSTSTSIIVSMVSSGLLEVSSAIPIIMGSNIGTSVTNTIVALMQAGDRTDFRRAFAGATVHDCFNWLSVLVLLPLEAATGYLHHVTGLVVASFNIRGGRDAPDLLKVITEPFTKLIIQLDKSVITSIAVGDESLRNHSLIRIWCQPETKEASTSMSRVEAIGSLANTTMEKCNHIFVDTGLPDLAVGLILLAGSLVVLCTCLILLVKMLNSLLKGQVANVIQKVINTDFPAPFTWVTGYFAMVVGASMTFVVQSSSVFTSAITPLIGLGVISIERAYPLTLGSNIGTTTTAILAALASPREKLSSSFQIALCHFFFNISGILLWYPLPCTRLPIRMAKALGKRTAKYRWFAVLYLLVCFLLLPSLVFGISMAGWQAMVGVGTPFGALLAFVVLVNVLQSRSPGHLPKWLQTWDFLPRWMHSLQPLDGLITRATLCYARPEPRSPQLPPRVFLEELPPATPSPRLALPAHHNATRL

SEQ ID NO: 13408 - DNA, 2554 bp, Homo sapiens
  ref <308>: DATABASE ACCESSION NUMBER: Refseq / NM_003052
  ref <309>: DATABASE ENTRY DATE: 2000-10-31
ctgctgagcagaagctgaaacacagaattctaagcgttgctgagacccactgacctgcagacctcatagtgggtgcccaggatgttgtcctacggagagaggctggggtcccctgctgtctccccactcccagtccgtggggggcatgtgatgcgagggacggcctttgcctacgtgcccagccctcaggtcctacacaggatcccggggacctctgcctatgccttccccagcctgggccctgtggcccttgctgagcacacctgcccctgtggggaggtcctggagcgccatgaaccactgcctgccaagctggccctggaggaggagcagaagccagagtccaggctggtccccaagctgcgccaggctggcgccatgctgctcaaggtgccactgatgctcaccttcctctacctcttcgtctgctccctggacatgctcagctcggccttccagctggctggagggaaggtggctggtgacatcttcaaggataacgccatcctgtccaacccggtggccgggctggtggtggggatcctggtgaccgtgctggtgcagagctccagcacctccacatccatcatcgtcagcatggtctcctctggcttgctggaggtgagctctgccatccccatcatcatgggctccaacatcggcacctctgtcaccaacaccatcgtggccctgatgcaggcgggggacaggactgacttccggcgggccttcgcgggggccacggtgcatgactgctttaactggctgtcagtgctggtcctgctgcccctggaggctgccactggctacctgcaccacatcactcgacttgtggtggcctccttcaacatccatggtggccgtgatgctcctgacctgctcaagatcatcacagagcccttcacgaagctcatcatccagctggacgagtctgtgataaccagcattgccactggtgatgagtccctgaggaaccacagtctcatccagatctggtgccacccagactccttacaggctcccacctccatgtccagagcagaggccaactccagccagacccttggaaatgccaccatggagaaatgcaaccacatctttgtggacactggcctaccggacctggctgtggggctcatcctgctggcaggatccctggtgctgctgtgcacctgcctcatcctcctagtcaagatgctcaactccctgctcaagggccaagtggccaaggtcatccagaaggtcatcaatacggacttccctgcccccttcacctgggtcacaggctactttgccatggtggtgggcgccagcatgaccttcgtggtccagagcagttctgtgttcacctcggccatcaccccactcatcggtcttggtgtgatcagcattgagagggcctacccgctcacactgggttccaacatcggcaccaccaccacggccatcctggctgccctggccagccccagggagaagctgtccagcgctttccagattgccctctgtcacttcttcttcaacatctcgggtatccttctgtggtacccggtgccctgcacacgcctgcccatccgcatggccaaggcgctggggaaacgcacggccaagtaccgctggtttgccgtcctctatctccttgtctgcttcctgctgctgccctcactggtgtttggcatctccatggcaggctggcaggtcatggtaggtgtgggcacgcccttcggggccctgctggccttcgtggtgctcatcaatgtcctgcagagtcggagtcccgggcacctgcccaagtggttacagacatgggacttcctgcctcgctggatgcactccctgaagcccctggaccacctcatcacccgcgccaccctatgctgtgccaggcctgagccccgctcacccccgctgccccccagggtcttcctggaggagctaccccctgccacaccctccccccgtcttgcactgcctgctcaccacaatgccacccgcctctaggctgtgggcccagactacagcctggaatggggaaggcctggtgtggaaaggcaggggagggagggtgtgtgtaggtatgtgcatgtgcctgtgccaccctgggtgccagtctctccttctgtagctccgcaaagctctgggcttgtgtgagagtgtcggtgtgtgtgcatgtgtgggggtgagtctgcatgtgcacctgtcatgtgtagaagcttgtatttgtgtacaggtgtgccagcccatgcaggtgtacacagacacacctgtgggaggctgtgtgcaggctgcaggatatctgggtatgatttcaggtcctctgcacgtgtacacatgactaggataggcaggagtaagggtgggtctgggtatatgactgtgcagctgtttgtgcatagatgttggtgcctgcgttactgaatttgcacacctccttgccaccttccttcctccaagataccatctcctcatcctaacccaggtcttcggccaccaccacaattaattcccttcccaacacttgcctgatgaaaaaaaaacaaaggaattaaaactc

SEQ ID NO: 13409 - protein, 639 aa, Homo sapiens
  ref <308>: DATABASE ACCESSION NUMBER: Refseq / NP_003043
  ref <309>: DATABASE ENTRY DATE: 2000-10-31
MLSYGERLGSPAVSPLPVRGGHVMRGTAFAYVPSPQVLHRIPGTSAYAFPSLGPVALAEHTCPCGEVLERHEPLPAKLALEEEQKPESRLVPKLRQAGAMLLKVPLMLTFLYLFVCSLDMLSSAFQLAGGKVAGDIFKDNAILSNPVAGLVVGILVTVLVQSSSTSTSIIVSMVSSGLLEVSSAIPIIMGSNIGTSVTNTIVALMQAGDRTDFRRAFAGATVHDCFNWLSVLVLLPLEAATGYLHHITRLVVASFNIHGGRDAPDLLKIITEPFTKLIIQLDESVITSIATGDESLRNHSLIQIWCHPDSLQAPTSMSRAEANSSQTLGNATMEKCNHIFVDTGLPDLAVGLILLAGSLVLLCTCLILLVKMLNSLLKGQVAKVIQKVINTDFPAPFTWVTGYFAMVVGASMTFVVQSSSVFTSAITPLIGLGVISIERAYPLTLGSNIGTTTTAILAALASPREKLSSAFQIALCHFFFNISGILLWYPVPCTRLPIRMAKALGKRTAKYRWFAVLYLLVCFLLLPSLVFGISMAGWQVMVGVGTPFGALLAFVVLINVLQSRSPGHLPKWLQTWDFLPRWMHSLKPLDHLITRATLCCARPEPRSPPLPPRVFLEELPPATPSPRLALPAHHNATRL

SEQ ID NO: 13410 - DNA, 492 bp, Rattus norvegicus
  misc_feature (1)..(492): n=a, c, g or t
  ref <308>: DATABASE ACCESSION NUMBER: EMBL / AI105374
  ref <309>: DATABASE ENTRY DATE: 2000-03-03
tctcaaccgtcgcannnnnntggtggaggaagagctggaccgggctcaggagcgactggccacagccctgcagaagctggaggaggcagagaaggctgctgacgagagtgagagaggcatgaaggtgatagagaaccgagccatgaaagacgaggaaaagatggagatccaggagatgcagctcaaagaagccaagcacatcgctgaggaggctgaccggaagtatgaggaggttgctcgtaagttggtcatcctggagggtgagctggagagagcagaggagcgggcggaggtgtctgaactaaagagtagcgacctggaagaggagctcaagaacgtaactaacaatctgaaatcactggaggctgcttctgaaaagtactctgaaaaggaggataaatatgaagaagaaatcaagcttctgtctgacaaactgaaagaggctgagacccgagctgagtttgcggaaaggacagtttctaaactggagaa

SEQ ID NO: 13411 - protein, 248 aa, Rattus norvegicus
  ref <308>: DATABASE ACCESSION NUMBER: Refseq / NP_036810
  ref <309>: DATABASE ENTRY DATE: 2002-11-05
MAGLNSLEAVKRKIQALQQQADDAEDRAQGLQRELDGERERREKAEGDAAALNRRIQLVEEELDRAQERLATALQKLEEAEKAADESERGMKVIENRAMKDEEKMEIQEMQLKEAKHIAEEADRKYEEVARKLVILEGELERAEERAEVSELKSSDLEEELKNVTNNLKSLEAASEKYSEKEDKYEEEIKLLSDKLKEAETRAEFAERTVSKLEKTIDDLEEKLAQAKEENVGLHQTLDQTLNELNCI

SEQ ID NO: 13412 - DNA, 2049 bp, Homo sapiens
  ref <308>: DATABASE ACCESSION NUMBER: Refseq / NM_003290
  ref <309>: DATABASE ENTRY DATE: 2000-10-31
gagcccagccgagcgtccgccgctgcccgtgcgcctctgcgctccgcgccatggccggcctcaactccctggaggcggtgaaacgcaagatccaggccctgcagcagcaggcggacgaggcggaagaccgcgcgcagggcctgcagcgggagctggacggcgagcgcgagcggcgcgagaaagctgaaggtgatgtggccgccctcaaccgacgcatccagctcgttgaggaggagttggacagggctcaggaacgactggccacggccctgcagaagctggaggaggcagaaaaagctgcagatgagagtgagagaggaatgaaggtgatagaaaaccgggccatgaaggatgaggagaagatggagattcaggagatgcagctcaaagaggccaagcacattgcggaagaggctgaccgcaaatacgaggaggtagctcgtaagctggtcatcctggagggtgagctggagagggcagaggagcgtgcggaggtgtctgaactaaaatgtggtgacctggaagaagaactcaagaatgttactaacaatctgaaatctctggaggctgcatctgaaaagtattctgaaaaggaggacaaatatgaagaagaaattaaacttctgtctgacaaactgaaagaggctgagacccgtgctgaatttgcagagagaacggttgcaaaactggaaaagacaattgatgacctggaagagaaacttgcccaggccaaagaagagaacgtgggcttacatcagacactggatcagacactaaacgaacttaactgtatataagcaaaacagaagagtcttgttccaacagaaactctggagctccgtgggtctttctcttctcttgtaagaagttccttttgttattgccatcttcgctttgctggaaatgtcaagcaaattatgaatacatgaccaaatattttgtatcggagaagctttgagcaccagttaaatctcattccttccctttttttttcaaatggcaccagctttttcagctctcttattttttccttaagtagcatttattcctaaggtaggcagggtatttcctagtaagcatactttcttaagacggaggccatttggttcctgggagaataggcagccccacactttgaagaatacagaccccagtatctagtcgtggatataattaaaacgctgaagaccataaccttttgggtcaactgttggtcaaactataggagagaccagggaccatcacatgggtagggattttccatccagagccaataaaaggactggtgggggccgggggtggctattgtgggaagtcataacccacagatagatcaacctaagaatcctggcccttctccactctccaccatgcaggacaaacatcttctcaagcagtcaacgtagaatgcttgggaaatagtcataattacccacatatagtaattaatagatggtaattaattgatccttgatgtgatgttcttttgcatatttccttcattctaaagttgttccctggccgggagcgtttgctttcgcctgtaatcccaacactttgggaggccaggacagatcacttgaggtcaggagttcgagaccagcccagccaacatggcgaaaccatgtctctactaaaaatacaaaaattatggtgacgcctgcctgtagtcccagctactcgggaggctgaggcaggaggatcgcttgaacccaggaagtggagactgcagtgagccgatatcgcaccacagcgctccagcctggtcgacagagtgagactccatctcaagaaaaaataaaaataaagttgttctctgaagagcaaatgtctcattccagtaatgacccactcagcaggaatatggtggagttcagtccaattcaggtcagccatatccaaaagaccacaagtcattactaagttgagcaaaagagtttttatctattagcagaaagggcctctctggcagcagagattaaaaactggcccaacttcatttccatacttcagggaacagcaaattgaggatttacttatctaggactt

SEQ ID NO: 13413 - protein, 248 aa, Homo sapiens
  ref <308>: DATABASE ACCESSION NUMBER: Refseq / NP_003281
  ref <309>: DATABASE ENTRY DATE: 2000-10-31
MAGLNSLEAVKRKIQALQQQADEAEDRAQGLQRELDGERERREKAEGDVAALNRRIQLVEEELDRAQERLATALQKLEEAEKAADESERGMKVIENRAMKDEEKMEIQEMQLKEAKHIAEEADRKYEEVARKLVILEGELERAEERAEVSELKCGDLEEELKNVTNNLKSLEAASEKYSEKEDKYEEEIKLLSDKLKEAETRAEFAERTVAKLEKTIDDLEEKLAQAKEENVGLHQTLDQTLNELNCI

SEQ ID NO: 13414 - DNA, 316 bp, Rattus norvegicus
  ref <308>: DATABASE ACCESSION NUMBER: EMBL / AI112391
  ref <309>: DATABASE ENTRY DATE: 2000-03-03
tttttttttttttttttctgatcacatgccaaagggcacaagagaatctcaccagtgcctagcatcttttgttttctctaaaaataacaaaaacctgcctttataaatgttaaaaacaacaatgtgttgtaattctttttttttttttccaaaaacaaacgaaccagagaaaggggaggagtgaggtgagagcaagaagagtatttggcatttcctctacttctcctgaacaggttaaggccctgagattagactctgttcttgggaccaagggctccttcaaagcccagtgcacagatgcccctcctggggctgg

SEQ ID NO: 13415 - protein, 432 aa, Rattus norvegicus; identical to SEQ ID NO: 6857
  ref <308>: DATABASE ACCESSION NUMBER: Refseq / NP_036769
  ref <309>: DATABASE ENTRY DATE: 2002-10-20

SEQ ID NO: 13416 - DNA, 3318 bp, Homo sapiens
  ref <308>: DATABASE ACCESSION NUMBER: Refseq / NM_002827
  ref <309>: DATABASE ENTRY DATE: 2002-01-09
gtgatgcgtagttccggctgccggttgacatgaagaagcagcagcggctagggcggcggtagctgcaggggtcggggattgcagcgggcctcggggctaagagcgcgacgcggcctagagcggcagacggcgcagtgggccgagaaggaggcgcagcagccgccctggcccgtcatggagatggaaaaggagttcgagcagatcgacaagtccgggagctgggcggccatttaccaggatatccgacatgaagccagtgacttcccatgtagagtggccaagcttcctaagaacaaaaaccgaaataggtacagagacgtcagtccctttgaccatagtcggattaaactacatcaagaagataatgactatatcaacgctagtttgataaaaatggaagaagcccaaaggagttacattcttacccagggccctttgcctaacacatgcggtcacttttgggagatggtgtgggagcagaaaagcaggggtgtcgtcatgctcaacagagtgatggagaaaggttcgttaaaatgcgcacaatactggccacaaaaagaagaaaaagagatgatctttgaagacacaaatttgaaattaacattgatctctgaagatatcaagtcatattatacagtgcgacagctagaattggaaaaccttacaacccaagaaactcgagagatcttacatttccactataccacatggcctgactttggagtccctgaatcaccagcctcattcttgaactttcttttcaaagtccgagagtcagggtcactcagcccggagcacgggcccgttgtggtgcactgcagtgcaggcatcggcaggtctggaaccttctgtctggctgatacctgcctcttgctgatggacaagaggaaagacccttcttccgttgatatcaagaaagtgctgttagaaatgaggaagtttcggatggggctgatccagacagccgaccagctgcgcttctcctacctggctgtgatcgaaggtgccaaattcatcatgggggactcttccgtgcaggatcagtggaaggagctttcccacgaggacctggagcccccacccgagcatatccccccacctccccggccacccaaacgaatcctggagccacacaatgggaaatgcagggagttcttcccaaatcaccagtgggtgaaggaagagacccaggaggataaagactgccccatcaaggaagaaaaaggaagccccttaaatgccgcaccctacggcatcgaaagcatgagtcaagacactgaagttagaagtcgggtcgtggggggaagtcttcgaggtgcccaggctgcctccccagccaaaggggagccgtcactgcccgagaaggacgaggaccatgcactgagttactggaagcccttcctggtcaacatgtgcgtggctacggtcctcacggccggcgcttacctctgctacaggttcctgttcaacagcaacacatagcctgaccctcctccactccacctccacccactgtccgcctctgcccgcagagcccacgcccgactagcaggcatgccgcggtaggtaagggccgccggaccgcgtagagagccgggccccggacggacgttggttctgcactaaaacccatcttccccggatgtgtgtctcacccctcatccttttactttttgccccttccactttgagtaccaaatccacaagccattttttgaggagagtgaaagagagtaccatgctggcggcgcagagggaaggggcctacacccgtcttggggctcgccccacccagggctccctcctggagcatcccaggcgggcggcacgccaacagccccccccttgaatctgcagggagcaactctccactccatatttatttaaacaattttttccccaaaggcatccatagtgcactagcattttcttgaaccaataatgtattaaaattttttgatgtcagccttgcatcaagggctttatcaaaaagtacaataataaatcctcaggtagtactgggaatggaaggctttgccatgggcctgctgcgtcagaccagtactgggaaggaggacggttgtaagcagttgttatttagtgatattgtgggtaacgtgagaagatagaacaatgctataatatataatgaacacgtgggtatttaataagaaacatgatgtgagattactttgtcccgcttattctcctccctgttatctgctagatctagttctcaatcactgctcccccgtgtgtattagaatgcatgtaaggtcttcttgtgtcctgatgaaaaatatgtgcttgaaatgagaaactttgatctctgcttactaatgtgccccatgtccaagtccaacctgcctgtgcatgacctgatcattacatggctgtggttcctaagcctgttgctgaagtcattgtcgctcagcaatagggtgcagttttccaggaataggcatttgcctaattcctggcatgacactctagtgacttcctggtgaggcccagcctgtcctggtacagcagggtcttgctgtaactcagacattccaagggtatgggaagccatattcacacctcacgctctggacatgatttagggaagcagggacaccccccgccccccacctttgggatcagcctccgccattccaagtcaacactcttcttgagcagaccgtgatttggaagagaggcacctgctggaaaccacacttcttgaaacagcctgggtgacggtcctttaggcagcctgccgccgtctctgtcccggttcaccttgccgagagaggcgcgtctgccccaccctcaaaccctgtggggcctgatggtgctcacgactcttcctgcaaagggaactgaagacctccacattaagtggctttttaacatgaaaaacacggcagctgtagctcccgagctactctcttgccagcattttcacattttgcctttctcgtggtagaagccagtacagagaaattctgtggtgggaacattcgaggtgtcaccctgcagagctatggtgaggtgtggataaggcttaggtgccaggctgtaagcattctgagctgggcttgttgtttttaagtcctgtatatgtatgtagtagtttgggtgtgtatatatagtagcatttcaaaatggacgtactggtttaacctcctatccttggagagcagctggctctccaccttgttacacattatgttagagaggtagcgagctgctctgctatatgccttaagccaatatttactcatcaggtcattattttttacaatggccatggaataaaccatttttacaaaa

SEQ ID NO: 13417 - protein, 435 aa, Homo sapiens; identical to SEQ ID NO: 6859
  ref <308>: DATABASE ACCESSION NUMBER: Refseq / NP_002818
  ref <309>: DATABASE ENTRY DATE: 2002-01-09

SEQ ID NO: 13418 - DNA, 474 bp, Rattus norvegicus
  misc_feature (1)..(474): n=a, c, g or t
  ref <308>: DATABASE ACCESSION NUMBER: EMBL / AI136540
  ref <309>: DATABASE ENTRY DATE: 2000-03-03
tttttttttttttttttagaggggagtctgataactttatttctagaccccagagggcgaggacattgcagcagggtgggccctgagttcccaaaagtgcctgggcatgagggttggagaatacagagctggaataagggaccctggcaagagtcagggttgatggtctctgctgcagggcacctcttggctcgtttacttccagcgcccgccgactttgcccttggctgtggcaccggccttcttgctgaacttggccagcatctccactctggcccggacagtcatgatatcgtatttctgacgtttcagcttctccccaaactcaaatttgtcagtctccagttggtacaaggtatcccagagttccttggncttgtccctcagcttatcatcactaagatggtcaatgttcagaggtttgcgcctttcagcaagaatcttctttttcatttcncgggctgtctgtttctt

SEQ ID NO: 13419 - protein, 248 aa, Rattus norvegicus
  ref <308>: DATABASE ACCESSION NUMBER: Refseq / NP_035750
  ref <309>: DATABASE ENTRY DATE: 2002-09-19
MSDEETEQVEEEAQEEEVQEEAPEPEEKPRPKLTAPKIPEGEKVDFDDIQKKRQNKDLMELQALIDSHFEARKKEEEELIALKERIEKRRAERAEQQRIRAEKERERQNRLAEEKARREEEDAKRRAEDDMKKKKALSSMGANYSSYLAKADQKRGKKQTAREMKKKILAERRKPLNIDHLSDDKLRDKAKELWDTLYQLETDKFEFGEKLKRQKYDITTLRSRIDQTQKHSKKAGATAKGKVGGRWK

SEQ ID NO: 13420 - DNA, 1000 bp, Homo sapiens
  ref <308>: DATABASE ACCESSION NUMBER: Refseq / NM_006757
  ref <309>: DATABASE ENTRY DATE: 2000-11-02
cccaccttcaccatgtctgacgaggaagttgaacaggtggaggagcagtacgaagaagaagaggaagcccaggaggaagaggaagttcaagaagacaccgcagaggaggacgcggaagaggagaaaccgagacccaaactcactgctcctaagatcccagaaggggagaaagtggacttcgatgacatccagaagaagcgtcagaacaaagacctaatggagctccaggccctcatcgacagccactttgaagcccggaagaaggaggaggaggagctggtcgctctcaaagagagaatcgagaagcgccgtgcagagagagcggagcagcagaggattcgtgcagagaaggagagggagcgccagaacagactggcggaggaaaaggccagaagggaggaggaggatgccaagaggagggcagaggacgacctgaagaagaagaaagcgctgtcctccatgggcgccaactacagcagctacctggccaaggctgaccagaagagaggcaagaagcagacagcccgagagatgaagaagaagattctggctgagagacgcaagccgctcaacatcgatcaccttggtgaagacaaactgagggacaaggccaaggagctctgggagaccctgcaccagctggagattgacaagttcgagtttggggagaagctgaaacgccagaaatatgacatcaccacgctcaggagccgcattgaccaggcccagaagcacagcaagaaggctgggaccccagccaagggcaaagtcggcgggcgctggaagtagagaggccagaaaggccctcgaggcagagaccctccgccctcttgcacaccagggccgctcgtgggactccacatcctccagcccccacaatcctgtcaggggtctccctgacgtcctgggggtggagaggccatcccggggcgtcccccgcgtctgtgtccttgctgccttcatcccctggggcctgtgaataaagctgcagaaccccctt

SEQ ID NO: 13421 - protein, 258 aa, Homo sapiens
  ref <308>: DATABASE ACCESSION NUMBER: Refseq / NP_006748
  ref <309>: DATABASE ENTRY DATE: 2000-11-02
MSDEEVEQVEEQYEEEEEAQEEEEVQEDTAEEDAEEEKPRPKLTAPKIPEGEKVDFDDIQKKRQNKDLMELQALIDSHFEARKKEEEELVALKERIEKRRAERAEQQRIRAEKERERQNRLAEEKARREEEDAKRRAEDDLKKKKALSSMGANYSSYLAKADQKRGKKQTAREMKKKILAERRKPLNIDHLGEDKLRDKAKELWETLHQLEIDKFEFGEKLKRQKYDITTLRSRIDQAQKHSKKAGTPAKGKVGGRWK

SEQ ID NO: 13422 - DNA, 336 bp, Rattus norvegicus
  ref <308>: DATABASE ACCESSION NUMBER: EMBL / AI145177
  ref <309>: DATABASE ENTRY DATE: 2000-03-03
cggccgcgggcagaagcagcgcgcgctgcacttgccgccccggcgtcccttgcgccgggctttggccgcggggaatgaggtggcgggggatgaaggcgccgccactccgctgccccccgggaggtcggccaccagggctttggagaagtctgccgtggcggcgccgcgcatgcccagcggggacagctgcgcttgagggacggccaggaactctccgccttcgccgccgctccctctctccccgcccggaggggtcatcatctccgggaggccctcggtcccctcccctaagtcacctggggccagcgataatgcatcgtaagcccctggcgggta

SEQ ID NO: 13423 - protein, 478 aa, Rattus norvegicus
  ref <308>: DATABASE ACCESSION NUMBER: Refseq / NP_062010
  ref <309>: DATABASE ENTRY DATE: 2002-11-05
MLHLSDFSGPDALLSKPTEGCAHTSPELPRLPARDAPSAAAYPGGDFLSWALSTCGAGGDLTDSCFLEGPAPTPPSGLSYSGSFFIQAVPEHPHDPEALFNLMSGILGLAPFPSPEAAASRSPLDVPFPAGPDALLPDLYSPDLSSAAFPEAFWEAAPSAGAPSQCLFEPQLSPPDVKPGLRAPPASPALDAAASAFKGPYAPWELLSAGAPGNCGSQGSFQTTPEARFSAVGTKVEDLLSISCPAELPGPASRLYPPGAYDAFSLAPGDLGEGTEGLPALLTPPGGEGGSGGEGGEFLAVPQAQLSPLGLRGAATADFSKALVADLPGGSGVAAPSSPATSFPAAKARRKGRRGGKCSARCFCPRPHVKAFACPVESCVRTFARSDELNRHLRIHTGHKPFQCRICLRNFSRSDHLTTHVRTHTGEKPFACDVCGRRFARSDEKKRHSKVHLKQKARAEERLKGLGFYSLGLSFAAL

SEQ ID NO: 13424 - DNA, 2145 bp, Homo sapiens
ccgcggctccccgactcctttcccagaggtgagtgcccgaagccaggagcccgggcgcctaggtctgtgcgctgcggggaacccctaccgccagcctccccgccacccgcgcgcccccaagcccagcgggcgaggccccgggcgccccacagccggcgccgcgccatgctccaccttagcgagttttccgaacccgacgcgctcctcgtcaagtccactgaaggctgttgcgccgaacccagcgctgaattgccccggctgcctgccagggacgctcccgcggccaccggctaccctggagcaggcgacttcttgagctgggctttgaacagctgcggcgcaagtggggacttagccgactcctgcttcctggaggggcctgcgcccacaccccctcccggcctcagctacagcggtagcttcttcattcaggcagtgcccgaacacccgcacgacccggaggcactcttcaacctcatgtcgggcatcttaggcctggcacccttccccggtccagaggcagcagcgtccagatccccgctggatgccccttttcctgcggggtccgatgccttgctgccgggtccgccggacctttactccccggatctgggcgctgcccctttcccagaggcgttctgggaggcctcgccttgcgcgggtgccccctcgcagtgcctgtatgagcctcagctctccccgcccgacgtcaagcccggcctccgggcgcctcccgcctcgccagcgctggacgctgtctctgccttcaagggtccctacgcgccctgggagctgctttctgtgggggccccagggaactgtgggtcacagggagactaccaggccgccccggaggctcgttttcccgtaatagggaccaagattgaggacttgctgtccatcagctgccctgcggaactgccggccgtcccagccaacagactctatcccagcggggcctatgacgctttcccgctggccccgggtgacttaggggagggggctgagggcctccctgggctcctgacccctcctagtggggagggagggagtagcggcgacggcggagagtttctggccagtacgcagcctcagctttccccgctgggccttcgcagcgccgccgcggcggacttccctaaacctctggtggcggacatccctggaagcagtggcgtggctgcaccacccgtgccgccgccgccgcccacccctttcccccaggccaaggcgcgacgcaaggggcgccgcggcggcaaatgcagcacgcgctgcttctgcccgcggccgcacgccaaggccttcgcttgcccggtggagagttgtgtgcggagctttgcgcgctccgacgagctcaatcgccacctgcgcatccacacgggccacaaacccttccagtgccgcatctgcctccgcaacttcagccgcagcgaccacctcaccacgcacgtgcgcacccacaccggcgagaagccttttgcttgcgacgtgtgcggccgccgcttcgcgcgcagcgatgagaagaaacggcacagcaaggtgcacctcaagcagaaggcgcgcgccgaggagcggctcaagggcctcggcttttactcgctgggcctctccttcgcttctctctgagcaagagatgggtttatgggttggggcgccgccgttcggcgcgcacgagttccgggccgttcccctccccgctcttcttccaactcctcctcgcacgcccgagggccggcctccggtcccgcttccagtttccttgaagcgcccgccgcacacgccctattcagcaccagctccgcggacagttcccgcggtccaggcgctgtcacccttgtcagccgcgctttgggggaagtcttctgagaccacccagtgaataggcactaccctgggattcaagacagtcttttgtaactggcacacgccccacgccttcctctataacccccagagacaggctggggcagcgccaaggcggtctcgcgcgggactttgtacagcagtgtcttatccagcagccattggatgtaacgttttgctttgggttttttttccttttgttgttgttaatttttgtaaagcagacgctactctcaagcagttgacaaaactgtttatttttgcaattaaaattattgtgct

SEQ ID NO: 13425 - protein, 486 aa, Homo sapiens
MLHLSEFSEPDALLVKSTEGCCAEPSAELPRLPARDAPAATGYPGAGDFLSWALNSCGASGDLADSCFLEGPAPTPPPGLSYSGSFFIQAVPEHPHDPEALFNLMSGILGLAPFPGPEAAASRSPLDAPFPAGSDALLPGPPDLYSPDLGAAPFPEAFWEASPCAGAPSQCLYEPQLSPPDVKPGLRAPPASPALDAVSAFKGPYAPWELLSVGAPGNCGSQGDYQAAPEARFPVIGTKIEDLLSISCPAELPAVPANRLYPSGAYDAFPLAPGDLGEGAEGLPGLLTPPSGEGGSSGDGGEFLASTQPQLSPLGLRSAAAADFPKPLVADIPGSSGVAAPPVPPPPPTPFPQAKARRKGRRGGKCSTRCFCPRPHAKAFACPVESCVRSFARSDELNRHLRIHTGHKPFQCRICLRNFSRSDHLTTHVRTHTGEKPFACDVCGRRFARSDEKKRHSKVHLKQKARAEERLKGLGFYSLGLSFASL

SEQ ID NO: 13426 - DNA, 486 bp, Rattus norvegicus
  misc_feature (1)..(486): n=a, c, g or t
  ref <308>: DATABASE ACCESSION NUMBER: EMBL / AI145494
  ref <309>: DATABASE ENTRY DATE: 2000-03-03
tttttttttttttttttggttttggcttaagttttctgttttgaaaagttaactactgatcgctttaagaagcttggacttgttttggacctactgcaatgccattacagtcgagaatatactgtaaacaaccttggggggctggccgctgaggaggggtcttgctggagtccggttccttaagtgttccactctgtggctgttgggtggttaaaggtctctgtggagacagggcaggagtcctggacaatagctggttcatcttgctgatgactagatcagtgatgagttgtctgtcctccacttggtgttccccaatcagtggcatgctacagtccatgacctcaaaaatgtagtctttgccatctttgccatgcacagctttgactgcacagatgtccaagcccccanacatctcagagcaagcgtcgacccagagctttgtacggtctgacatggcgatctgctccagcatcgcggagccaa

SEQ ID NO: 13427 - DNA, 2074 bp, Homo sapiens; identical to SEQ ID NO: 3578
  ref <308>: DATABASE ACCESSION NUMBER: EMBL / U40215
  ref <309>: DATABASE ENTRY DATE: 1999-07-01

SEQ ID NO: 13428 - protein, 479 aa, Homo sapiens
  misc_feature (1)..(479): Xaa=Unknown amino acid
MMNFLRRRLSDSSFIANLPNGYMTDLQRPEPQQPPPPPPPGPGAASASAAPPTASPGPERRPPPASAPAAQPAPTPSVGSSFFSSLSQAVKQTAASAGLVDAPAPAPAAARKAKVLLVVDEPHADWAKCFRGKKVLGDYDIKVEQAEFSELNLVAHADGTYAVDMQVLRNGTKVVRSFRPDFVLIRQHAFGMAENEDFRHLIIGMQYAGLPSINSLESIYNFCDKPWVFAQLVAIYKTLGGEKFPLIEQTYYPNHKEMLTLPTFPVVVKIGHAHSGMGKVKVENHYDFQDIASVVALTQTYATAEPFIDSKYDIRVQKIGNNYKAYMRTSISGNWKTNTGSAMLEQIAMSDRYKLWVDTCSEMFGGLDICAVKAVHGKDGKDYIFEVMDCSMPLIGEHQVEDRQLITELVISKMNQLLSRTPALSPQRPLTTQQPQSGTLKDPDSSKTPPQRPPPQGCLQYILDCNGIAVGPKQVQASX

SEQ ID NO: 13429 - DNA, 486 bp, Rattus norvegicus; identical to SEQ ID NO: 13426
  misc_feature (1)..(486): n=a, c, g or t
  ref <308>: DATABASE ACCESSION NUMBER: EMBL / AI145494
  ref <309>: DATABASE ENTRY DATE: 2000-03-03

SEQ ID NO: 13430 - DNA, 2074 bp, Homo sapiens; identical to SEQ ID NO: 3578
  ref <308>: DATABASE ACCESSION NUMBER: EMBL / U40215
  ref <309>: DATABASE ENTRY DATE: 1999-07-01

SEQ ID NO: 13431 - protein, 479 aa, Homo sapiens; identical to SEQ ID NO: 13428
  misc_feature (1)..(479): Xaa=Unknown amino acid

SEQ ID NO: 13432 - DNA, 464 bp, Rattus norvegicus
  ref <308>: DATABASE ACCESSION NUMBER: EMBL / AI145680
  ref <309>: DATABASE ENTRY DATE: 2000-03-03
tttttttttttttttttaattgttttgtagattttaatactaactttttgcatttgatttcaaaaatggccaattacttctaaccacacagtgtctctgaataggagcaaaggtatcaattcagtggcaacaccttagcactagactgtagtgagcattccagaagaggtgcccagcaggtgacaggctgtggctggaactgccaagatccagaattttatgcttcaaatttctcaaatatatacctagcagcagatgtaccaggcaactataatgctagaaaaatactttagtcagtattttataaacctgtgacctttaagcagtatttctattcataaatgttccggtaacaatgtctgtctgacaaagcattacaacaacaacaaaacaagattaaggttagttacctcaagcaagctagttgttatttttcctcttaaaatgcctcgtgccgaattctt

SEQ ID NO: 13433 - protein, 494 aa, Rattus norvegicus; identical to SEQ ID NO: 2128
  ref <308>: DATABASE ACCESSION NUMBER: SWISS-Prot / CAA60116
  ref <309>: DATABASE ENTRY DATE: 2002-06-15

SEQ ID NO: 13434 - DNA, 648 bp, Rattus norvegicus; identical to SEQ ID NO: 6934
  ref <308>: DATABASE ACCESSION NUMBER: EMBL / AI170685
  ref <309>: DATABASE ENTRY DATE: 2000-03-03

SEQ ID NO: 13435 - protein, 412 aa, Rattus norvegicus
  ref <308>: DATABASE ACCESSION NUMBER: SWISS-Prot / BAA88301
  ref <309>: DATABASE ENTRY DATE: 2002-06-15
MANVADTKLYDILGVPPGASENELKKAYRKLAKEYHPDKNPNAGDKFKEISFAYEVLSNPEKRELYDRYGEQGLREGSGGGGGMDDIFSHIFGGGLFGFMGNQSRSRNGRRRGEDMMHPLKVSLEDLYNGKTTKLQLSKNVLCSACSGQGGKSGAVQKCSACRGRGVRIMIRQLAPGMVQQMQSVCSDCNGEGEVINEKDRCKKCEGKKVIKEVKILEVHVDKGMKHGQRITFTGEADQAPGVEPGDIVLLLQEKEHEVFQRDGNDLHMTYKIGLVEALCGFQFTFKHLDARQIVVKYPPGKVIEPGCVRVVRGEGMPQYRNPFEKGDLYIKFDVQFPENNWINPDKLSELEDLLPSRPEVPNVIGETEEVELQEFDSTRGSGGGQRREAYNDSSDEESSSHHGPGVQCAHQ

SEQ ID NO: 13436 - DNA, 1993 bp, Homo sapiens; identical to SEQ ID NO: 6936
  ref <308>: DATABASE ACCESSION NUMBER: Refseq / NM_005880
  ref <309>: DATABASE ENTRY DATE: 2002-11-04

SEQ ID NO: 13437 - protein, 412 aa, Homo sapiens; identical to SEQ ID NO: 6937
  ref <308>: DATABASE ACCESSION NUMBER: Refseq / NP_005871
  ref <309>: DATABASE ENTRY DATE: 2002-11-04

SEQ ID NO: 13438 - DNA, 458 bp, Rattus norvegicus
  ref <308>: DATABASE ACCESSION NUMBER: EMBL / AI175900
  ref <309>: DATABASE ENTRY DATE: 2000-03-03
aaaatggctgaggcttggagtagcattgctggggcttagagcagcattgctgggacttacagtggtatgggtgggacttggagtgctatgtgtagggcttacagtaggtcgcagacaaagcggtacacgtagcgcttgcccgccgtcttgtggatgatatttttgtcgtaatagtagcgaaggccgcggctcagtttctcataattcatcttaggcttgtttttcctctttccccatctcctggccacctcatctgggtcggaaagcttgaattcccagccgtctcctgtccagctgataaaagactgacaagacttatcagtgagtaattccagaagaaactgccacagctggatcggcccacttcctgtgtagccagccagggcagcagcaggaatgacaggcttgtccttgttgaggtcagcacggtcacgcacatagtccttgaaggtgccctt

SEQ ID NO: 13439 - protein, 441 aa, Rattus norvegicus
  ref <308>: DATABASE ACCESSION NUMBER: SWISS-Prot / P41156
  ref <309>: DATABASE ENTRY DATE: 2002-06-15
MKAAVDLKPTLTIIKTEKVDLELFPSPDMECADVPLLTPSSKEMMSQALKATFSGFTKEQQRLGIPKDPRQWTETHVRDWVMWAVNEFSLKGVDFQKFCMNGAALCALGKECFLELAPDFVGDILWEHLEILQKEDVKPYQVNGVNPTYPESRYTSDYFISYGIEHAQCVPPSEFSEPSFITESYQTLHPISSEELLSLKYENDYPSVILRDPLQTDTLQTDYFAIKQEVLTPDNMCMGRASRGKLGGQDSFESIESYDSCDRLTQSWSSQSSFNSLQRVPSYDSFDSEDYPAALPNHKPKGTFKDYVRDRADLNKDKPVIPAAALAGYTGSGPIQLWQFLLELLTDKSCQSFISWTGDGWEFKLSDPDEVARRWGKRKNKPKMNYEKLSRGLRYYYDKNIIHKTAGKRYVYRFVCDLQSLLGYTPEELHAMLDVKPDADE

SEQ ID NO: 13440 - DNA, 1450 bp, Homo sapiens
  ref <308>: DATABASE ACCESSION NUMBER: EMBL / J04101
  ref <309>: DATABASE ENTRY DATE: 2000-03-04
ttgggaagaaagtcggatttcccccgtccccttccccctgttactaatcctcattaaaaagaaaaacaacaataactgcaaacttgctaccatcccgtacgtcccccactcctggcaccatgaaggcggccgtcgatctcaagccgactctcaccatcatcaagacggaaaaagtcgatctggagcttttcccctccccggatatggaatgtgcagatgtcccactattaactccaagcagcaaagaaatgatgtctcaagcattaaaagctactttcagtggtttcactaaagaacagcaacgactggggatcccaaaagacccccggcagtggacagaaacccatgttcgggactgggtgatgtgggctgtgaatgaattcagcctgaaaggtgtagacttccagaagttctgtatgaatggagcagccctctgcgccctgggtaaagactgctttctcgagctggccccagactttgttggggacatcttatgggaacatctagagatcctgcagaaagaggatgtgaaaccatatcaagttaatggagtcaacccagcctatccagaatcccgctatacctcggattacttcattagctatggtattgagcatgcccagtgtgttccaccatcggagttctcagagcccagcttcatcacagagtcctatcagacgctccatcccatcagctcggaagagctcctctccctcaagtatgagaatgactacccctcggtcattctccgagaccctctccagacagacaccttgcagaatgactactttgctatcaaacaagaagtcgtcaccccagacaacatgtgcatggggaggaccagtcgtggtaaactcgggggccaggactcttttgaaagcatagagagctacgatagttgtgatcgcctcacccagtcctggagcagccagtcatctttcaacagcctgcagcgtgttccctcctatgacagcttcgactcagaggactatccggctgccctgcccaaccacaagcccaagggcaccttcaaggactatgtgcgggaccgtgctgacctcaataaggacaagcctgtcattcctgctgctgccctagctggctacacaggcagtggaccaatccagctatggcagtttcttctggaattactcactgataaatcctgtcagtcttttatcagctggacaggagatggctgggaattcaaactttctgacccagatgaggtggccaggagatggggaaagaggaaaaacaaacctaagatgaattatgagaaactgagccgtggcctacgctactattacgacaaaaacatcatccacaagacagcggggaaacgctacgtgtaccgctttgtgtgtgacctgcagagcctgctggggtacacccctgaggagctgcacgccatgctggacgtcaagccagatgccgacgagtgatggca

SEQ ID NO: 13441 - protein, 441 aa, Homo sapiens
  ref <308>: DATABASE ACCESSION NUMBER: SWISS-Prot / TVHUET
  ref <309>: DATABASE ENTRY DATE: 2002-06-15
MKAAVDLKPTLTIIKTEKVDLELFPSPDMECADVPLLTPSSKEMMSQALKATFSGFTKEQQRLGIPKDPRQWTETHVRDWVMWAVNEFSLKGVDFQKFCMNGAALCALGKDCFLELAPDFVGDILWEHLEILQKEDVKPYQVNGVNPAYPESRYTSDYFISYGIEHAQCVPPSEFSEPSFITESYQTLHPISSEELLSLKYENDYPSVILRDPLQTDTLQNDYFAIKQEVVTPDNMCMGRTSRGKLGGQDSFESIESYDSCDRLTQSWSSQSSFNSLQRVPSYDSFDSEDYPAALPNHKPKGTFKDYVRDRADLNKDKPVIPAAALAGYTGSGPIQLWQFLLELLTDKSCQSFISWTGDGWEFKLSDPDEVARRWGKRKNKPKMNYEKLSRGLRYYYDKNIIHKTAGKRYVYRFVCDLQSLLGYTPEELHAMLDVKPDADE

SEQ ID NO: 13442 - DNA, 458 bp, Rattus norvegicus; identical to SEQ ID NO: 13438
  ref <308>: DATABASE ACCESSION NUMBER: EMBL / AI175900
  ref <309>: DATABASE ENTRY DATE: 2000-03-03

SEQ ID NO: 13443 - protein, 441 aa, Rattus norvegicus; identical to SEQ ID NO: 13439
  ref <308>: DATABASE ACCESSION NUMBER: SWISS-Prot / P41156
  ref <309>: DATABASE ENTRY DATE: 2002-06-15

SEQ ID NO: 13444 - DNA, 1450 bp, Homo sapiens; identical to SEQ ID NO: 13440
  ref <308>: DATABASE ACCESSION NUMBER: EMBL / J04101
  ref <309>: DATABASE ENTRY DATE: 2000-03-04

SEQ ID NO: 13445 - protein, 441 aa, Homo sapiens; identical to SEQ ID NO: 13441
  ref <308>: DATABASE ACCESSION NUMBER: SWISS-Prot / TVHUET
  ref <309>: DATABASE ENTRY DATE: 2002-06-15

SEQ ID NO: 13446 - DNA, 545 bp, Rattus norvegicus
  ref <308>: DATABASE ACCESSION NUMBER: EMBL / AI178267
  ref <309>: DATABASE ENTRY DATE: 1999-01-22
tcagatttatttggaaattcacagtttctaatggtactacagctctgtagttacatatttaaaaccctcttttcacaacacatagtgacttcccactctggctctgctggcatctggacttcaagggcctgctgtaccatcaggccctattgctctgaatggctaattgtgcagactggaaggggtaaaattcatttcctaaaacgtactgttcacctaaagcagcaacttaaagaaaaaggccttaaataaatcacattacaaacaacaccaaaaaaggtattagacaaatttaaaaacaattattaacaaaagtgctcaataagttataacttaaattttacaacacaaaatggtcaattctctcaaaaacacatttcactttcactcatccctgtacaatccaccttaaagctttgtagtgttgcagcttaaaaaacctaataaagttacaaaacaaatcaactgacagaaaaagttctccctcctcttccagtggcattataaatagacaaaaggcacataaatatgggaaggtgcaagaa

SEQ ID NO: 13447 - DNA, 545 bp, Rattus norvegicus; identical to SEQ ID NO: 13446
  ref <308>: DATABASE ACCESSION NUMBER: EMBL / AI178267
  ref <309>: DATABASE ENTRY DATE: 1999-01-22

SEQ ID NO: 13448 - DNA, 545 bp, Rattus norvegicus; identical to SEQ ID NO: 13446
  ref <308>: DATABASE ACCESSION NUMBER: EMBL / AI178267
  ref <309>: DATABASE ENTRY DATE: 1999-01-22

SEQ ID NO: 13449 - DNA, 545 bp, Rattus norvegicus; identical to SEQ ID NO: 13446
  ref <308>: DATABASE ACCESSION NUMBER: EMBL / AI178267
  ref <309>: DATABASE ENTRY DATE: 1999-01-22

SEQ ID NO: 13450 - DNA, 1182 bp, Rattus norvegicus
  ref <308>: DATABASE ACCESSION NUMBER: Refseq / NM_031643
  ref <309>: DATABASE ENTRY DATE: 2002-11-02
atgcccaagaagaagccgacgcccatccagctgaacccggcccccgatggctccgcggttaacgggaccagctcggccgagaccaacctggaggccttgcagaagaagctggaggagctggagctggacgagcagcagcggaagcgccttgaggcctttctgacgcagaagcagaaggtgggagagttgaaggatgatgactttgagaagatcagtgaactgggggctggcaatggtggagtggtgttcaaggtctcccacaagccatctggcctggttatggctaggaagctaattcacctggagatcaaacccgcaatccggaaccagatcatccgggagctgcaggtgctgcatgagtgcaactccccgtacatagtgggcttctacggggccttctacagtgacggcgagatcagcatctgcatggagcacatggatggtgggtccttggatcaagtgctgaagaaagctggaagaattcctgagcaaattttaggaaaagtcagcatcgctgtgataaaaggcctgacatatctacgagagaagcacaagattatgcacagagatgtcaagccttccaacattctagtgaactcacgtggggagatcaaactctgcgattttggggtcagcgggcagctaattgactccatggccaactccttcgtgggaacaaggtcctacatgtcgcctgagagactccaggggactcactactctgtgcagtcggacatctggagcatggggctctctctggtggagatggcagttggaagataccccattcctcctcctgatgccaaggagctggagctgctgtttggatgccaggtggaaggagacgcggccgaaacgccacccaggccaaggacccctgggaggcccctcagctcatatggaatggatagccgacctcccatggcaatttttgagttgttggattacatcgtcaatgagcctcctccaaaactgcccagtggagtattcagtctggaatttcaggattttgtgaataagtgcttaataaagaaccctgcagagagagcagatctgaagcagctcatggtacatgctttcatcaagagatctgatgccgaggaggtagacttcgcaggctggctctgctccaccattgggcttaaccagcccagcacaccaacccacgctgccagcatctga

SEQ ID NO: 13451 - protein, 393 aa, Rattus norvegicus
  ref <308>: DATABASE ACCESSION NUMBER: Refseq / NP_113831
  ref <309>: DATABASE ENTRY DATE: 2002-11-02
MPKKKPTPIQLNPAPDGSAVNGTSSAETNLEALQKKLEELELDEQQRKRLEAFLTQKQKVGELKDDDFEKISELGAGNGGVVFKVSHKPSGLVMARKLIHLEIKPAIRNQIIRELQVLHECNSPYIVGFYGAFYSDGEISICMEHMDGGSLDQVLKKAGRIPEQILGKVSIAVIKGLTYLREKHKIMHRDVKPSNILVNSRGEIKLCDFGVSGQLIDSMANSFVGTRSYMSPERLQGTHYSVQSDIWSMGLSLVEMAVGRYPIPPPDAKELELLFGCQVEGDAAETPPRPRTPGRPLSSYGMDSRPPMAIFELLDYIVNEPPPKLPSGVFSLEFQDFVNKCLIKNPAERADLKQLMVHAFIKRSDAEEVDFAGWLCSTIGLNQPSTPTHAASI

SEQ ID NO: 13452 - DNA, 2222 bp, Homo sapiens; identical to SEQ ID NO: 12655
  ref <308>: DATABASE ACCESSION NUMBER: Refseq / NM_002755
  ref <309>: DATABASE ENTRY DATE: 2001-07-05

SEQ ID NO: 13453 - protein, 393 aa, Homo sapiens [sequence omitted]

SEQ ID NO: 13454 - DNA, 613 bp, Rattus norvegicus
  ref <308>: DATABASE ACCESSION NUMBER: EMBL / AI179610
  ref <309>: DATABASE ENTRY DATE: 2000-03-03
attagataatgccatttattatttcacacagaagttagagaccaaggttacaattattaaataccacccacccctcaaaagacagccctacttggttagaataaaaaaacaatcgatacaacaaaaaataccattacactggtagaactggggaaataacaaaaacaagacagaaacacaagacagaaaatctctgcacactgatatcaaagtggccatgacgctgggggaaagcagtcatggtcagtcaacatggacgccgactaccaagggcactgggctcagaacagccgcctctaccgaccacagttctggggctctgttgcaggatttggggctgctggtttccaagttcaggcccctggctgtgcttttggtgagggaaatgtgccaggcatctccttccattccagagagacaaaggaagacacaggaagggggcgaggaaccccaaaagctttcttagaggcccaagaaaagagagccaggcaagattctcccctgcagagagaaggctacatgagacagagttcacagcctctgggggccaacactgcatttacatggcataaattcccactgccacggtcgccaacaggaaactgagtgttga

SEQ ID NO: 13455 - DNA, 1550 bp, Homo sapiens; identical to SEQ ID NO: 2405
  ref <308>: DATABASE ACCESSION NUMBER: Refseq / NM_002133
  ref <309>: DATABASE ENTRY DATE: 2002-11-05

SEQ ID NO: 13456 - DNA, 465 bp, Rattus norvegicus
  ref <308>: DATABASE ACCESSION NUMBER: EMBL / AI228674
  ref <309>: DATABASE ENTRY DATE: 1998-11-02
ctcatttagtttttattcataatcataaacttaactttgcaatcctgctagacttgaaggggaatgaggaaaatatggaacccaaagaacttcagtgagagcagagattacagggtattgcgagcagatggggtgggggtgctctcctgagctacagaaggaatggtttgatgggtaaaatgcccgcaagtcaaagaaattagagttgtccacagtcggagatggtgatcttcttgctggtcttggcagtgcagataaaaaactgggaaccatttgtgtttggtccagcatttgccatggacaagatgccaggacctgtatgcttcaggatgaagttctcatcctagaaatttctctccgtagatggacttgccaccaatgccattatggcgtgtgaagtcaccaccctgacgcatgaatcctggactagttatgtgaaaggagtaacccctatagccaaatcct

SEQ ID NO: 13457 - protein, 164 aa, Rattus norvegicus
  ref <308>: DATABASE ACCESSION NUMBER: Refseq / NP_058797
  ref <309>: DATABASE ENTRY DATE: 2002-11-05
MVNPTVFFDITADGEPLGRVCFELFADKVPKTAENFRALSTGEKGFGYKGSSFHRIIPGFMCQGGDFTRHNGTGGKSIYGEKFEDENFILKHTGPGILSMANAGPNTNGSQFFICTAKTEWLDGKHVVFGKVKEGMSIVEAMERFGSRNGKTSKKITISDCGQL

SEQ ID NO: 13458 - DNA, 8230 bp, Homo sapiens
  ref <308>: DATABASE ACCESSION NUMBER: Refseq / XM_016774
  ref <309>: DATABASE ENTRY DATE: 2002-08-01
agaggctgcggtgagtccgccagccccagctgctcctcctcaagcccccaaggcccttcggcgggcccctgctgaaagaccggcatgccctattctgtgggcttccgcgaagccgatgctgctaccagctttctgagagcagcaagatcaggtaacttggacaaagctttggatcacctgcggaatggggtagatattaacacctgtaaccagaatgggttgaatggcttgcatctggcttctaaggaaggccatgtgaaaatggtggttgaacttctgcacaaagaaatcattctagaaacgacaaccaagaaggggaacacggccctgcacatcgctgctctagccgggcaggatgaggtggtccgggagcttgtcaactatggagccaacgtcaacgcccagtcacagaaaggttttacacccctgtacatggcagcacaagagaaccacttggaagtggttaagtttttactggaaaatggagctaaccagaatgtagccacagaagacggcttcacgcctctggcggtagccctgcagcagggccatgagaacgtcgtcgcgcacctcatcaactacggcaccaaggggaaggtgcgcctcccggccctgcacatcgcggcccgcaacgacgacacgcgcacggctgcggtgctgctgcagaacgaccccaacccggacgtgctttccaagacgggattcacgcccctgcacattgcggctcactacgagaacctcaacgtggcccagttgctcctcaacagaggagccagcgtcaatttcacaccacagaacggcatcacgccactgcacatcgcctcccgcaggggcaacgtgatcatggtgcggctgctgctggatcggggagcccagatagaaaccaagaccaaggacgaattgacacctctccactgtgcagctcgaaatgggcacgtgcgaatctcagagatcctgctggaccacggggcaccaatccaagccaaaaccaagaacggcctgtccccaattcacatggcggctcagggagaccacctcgactgtgtccggctcctgttgcaatacgacgcagagatagacgacatcaccctggaccacctgaccccactccacgtggctgcccactgtggacaccacagggtggctaaggtccttctggataaaggggccaaacccaactccagagccctgaatggctttacccccttacacatcgcctgcaaaaagaaccacgtccgtgtcatggagctgctgctgaagacgggagcctcgatcgacgcggtcaccgagtctggcctgacacctctccacgtggcctccttcatggggcaccttcccatcgtgaagaacctcctgcagcggggggcgtcgcccaacgtctccaacgtgaaagtggagaccccgctacacatggcagccagagccgggcacacggaagtggccaaatatttactccagaacaaagccaaagtcaatgccaaggccaaggatgaccagaccccacttcactgtgcagctcgcatcggccacacaaacatggtgaagctcctgctggaaaataacgccaaccccaacctggccaccaccgccgggcacacccccctgcacattgcagcccgtgagggccatgtggaaacagtcctggcccttctggaaaaggaagcatcccaggcctgcatgaccaagaaaggatttacccctctgcacgtggcggccaagtacgggaaggtgcgggtggcagagctgctgctggagcgggacgcacacccgaatgctgccggaaaaaatggcctgacccccctgcacgtggccgtccatcacaacaacctggacatcgtcaagctgctgcttccccggggcggctccccgcacagccctgcctggaatggctacacccctttgcacatcgctgccaagcagaaccaggtggaggtggcccgtagtctgctgcagtatgggggctcagcaaacgccgagtcggtgcaaggtgtgacgccccttcacctggccgcccaggagggccacgcagagatggtggctctgctgctctcgaaacaagccaatggcaacctggggaacaagagcggactcactcccctccatctggtagcacaagaaggccacgttccagtggcagatgtgctgatcaaacacggcgtcatggtggacgccaccacccggatgggctacactcccctccatgtggccagtcactatggaaacatcaagctggtgaagtttctgctgcagcaccaggcagatgtcaatgccaagaccaagctaggatacagccccctgcaccaggcagcccagcagggacacacagacatcgtgactctgcttctgaaaaacggtgcttccccaaacgaggtcagctcggatggaaccacacctctggccatagccaagcgcttgggctacatttctgtcaccgacgtgctcaaggtcgtcacggatgaaaccagtttcgtgttagtcagtgataagcatcgaatgagtttccctgagacagttgatgagatcctggatgtctcggaagatgaaggggaagaactcatcagcttcaaggctgagaggcgggattccagggatgttgatgaagagaaggagctgctggattttgtgccgaagctagaccaagtggtggaatctccagccatccccaggattccctgtgccatgcctgagacagtggtgatcaggtcagaagagcaggagcaggcatctaaagagtatgatgaggactccctcatccccagcagcccggccaccgagacctcagacaacatcagcccggtggccagcccggtgcatacagggtttctggtgagcttcatggttgacgcccggggtggttccatgagaggaagtcgccacaacggcctgcgagtggtgatcccgccacggacgtgcgcagcgcccacccgcatcacctgccgcctggtcaagccccagaagctcagcacgccgcccccactggccgaggaggagggcctcgccagcaggatcatagcactggggcccacgggggcacagttcctgagccctgtaatcgtggagatcccgcactttgcctcccatggccgtggagaccgcgagctcgtggttctgaggagcgaaaacggctccgtgtggaaggagcacaggagccgctatggagagagctacctggatcagatcctcaacgggatggacgaagagctggggagcctggaggagctagagaagaagagggtgtgccgaatcatcaccaccgacttcccgctgtacttcgtgatcatgtcacggctctgccaggactacgacaccatcggtcccgaagggggctccctgaagagcaagctggtgcccctggtacaggcaacgttcccggagaatgccgtcaccaagagagtgaagctggctctgcaggcccagcctgtcccggatgagcttgtcactaagctcctgggcaaccaggccacattcagccccattgtcaccgtggagccccggcgccggaagttccaccgccccattgggcttcggatcccactacctccttcctggaccgacaacccgagggacagcggggagggagacaccaccagcctgcgcctgctttgcagcgtcattggaggaacagaccaagcccagtgggaagacataacaggaaccaccaaacttgtatatgccaacgagtgcgccaacttcaccaccaatgtctctgccaggttttggctgtcggactgtcctcggactgctgaggctgtgaactttgccaccctgctgtacaaagagctcactgcagtgccctacatggccaaattcgtcatctttgccaagatgaatgacccccgagaggggcgcctgcgctgctactgcatgacagatgataaagtggacaagaccctggagcagcatgagaacttcgtggaggtggcccggagcagggacatagaggtgttggaaggaatgtccctgtttgcagaactctctgggaacctggtgcctgtgaagaaagctgcccagcagcggagcttccacttccagtcatttcgggagaaccgtctggccatgcctgtaaaggtgagggacagcagtcgagagccgggagggtccctgtcgtttctgcgcaaggcgatgaagtacgaggacacccagcacattctctgccacctgaacatcaccatgcccccctgcgccaagggaagtggagccgaagataggagaaggaccccgacgcccctggccctgcgatacagcattctcagtgagtccacaccaggttctctcagtgggacagagcaggcagagatgaagatggctgttatctcagagcacctcggtctcagctgggcagagttggcccgggagctgcagttcagtgtggaagacatcaacaggatccgagtggaaaatcccaactccctgttggagcagagtgtggccttgctgaacctctgggtcatccgtgaaggccaaaacgcaaacatggagaatctgtacacagccctgcagagcattgaccgtggcgagatcgtgaacatgctggagggttccggccgacagagccgcaacttgaagccagacaggcggcacaccgaccgcgactactcgctgtcaccctcccagatgaatggttactcctcactgcaggacgagctgctgtcccctgcctccctgggctgtgcactttcctctccgctacgtgcagaccagtactggaatgaggtggccgtcctagacgccatccccttggcggccacggagcatgacaccatgctggagatgtctgacatgcaggtgtggtctgcgggcctcacgccttctctggtcactgctgaggactcctctctggagtgtagcaaggctgaggactctgatgccacaggtcacgagtggaagttggagggggcactctcagaggaaccgcggggccccgagttgggctctctggaacttgtggaggacgacacagtggattcagatgccacaaatggccttatcgatttgcttgaacaggaggaaggtcagaggtcagaagagaagctgccaggttctaagaggcaggatgacgcgacaggtgcagggcaggactcagagaatgaagtgtctcttgtttcaggccatcagagggggcaagcccgaatcacacattcccccaccgtgagtcaggtgacggagaggagtcaggacagactgcaggactgggatgcagacggctcgattgtctcatacctgcaagatgctgcacaaggttcctggcaagaggaggtcacgcaaggtccacactcattccagggaacaagtaccatgactgaagggctagagcccggtggatctcaggagtacgagaaggtcctggtgtctgtaagtgagcacacgtggacagaacagcccgaggctgagagctcccaggccgacagggaccggaggcagcaaggccaagaagagcaggtgcaggaggccaagaacaccttcacccaagtggtgcaggggaatgagtttcagaatattccaggggagcaggtgacagaggagcaattcacggatgagcagggcaacattgtcaccaagaagatcattcgcaaggtggttcgacagatagacttgtccagcgccgatgccgcccaggagcacgaggaggtgactgtagaggggcccctggaggatcccagtgagctggaggtcgatattgattactttatgaaacactccaaggatcacacctcgacacccaacccctgaaccccacacactctgccatgcacacaggaggagagctggacctgagggccaccgcagcggtgcacacattcctctgggctgacggcatgacctctgtaagggactcctgctagtcccctcttggcatgaatgactgactgtagacgcatgacctccaggcttcaatcctgcctcttgcaatgacagctgatctgtcggaaccaggacacaaaagcagcaagaagcggggagagagagggatagaaaacaagcgcaggagagcctgcgaacgcaaaagtgaatgagggctttttgtggctggggatgggttttggttttggggttttttttttaaattgttttgacttcgtacagggtactttttcccaacctcatctgtcagaaatccatgtgggcttcctggaaagaaaaaaaaaaaaaagaaaactaggcatgaaatcagtttaacaccttaatcttaagccatgtcctcatctgcccaccctccccaacccacatacctccattccacttgtgacaccccctcgactccctggtgacgctcctcccagatcgctctacatgacattcaggacacacacacacacacacacaccactcgcctccactgaatctacacacagattttactgtgacttctgaagctgtatagactctgctgtggataaattggaattttttatgttgtctctctctctgccaatttcaatacgaatcatcttccaatggaaaatcattaccttgaagagtgcattcggggttccttgtgttagggacttaagaatctgaggcgaggacccccaggcttacctgtaggactcaaagggagccaggaccccatctgaaagggtctcctctctcagttgggggacaggccggtggctgacccaggattgcaccagcatgtccatagagaagaggttttctatgtcttcaagcactatatcatagtccgtgttcaaagtgtaaactgtacagtaatcagccttgtgtatatgaaaaacaataaatactatgcaaaccaatagaaacatttagcagtacgtacagagcctgacagcgcagctcctgaggacttctgcggctgcaggagaaggagctgtggcctgtctttcagtgaaagaggaaggaaaggagtagggctagtgaatgtatctgccaggtcttagaagtcaggaccacccagggtctcccagagtgaacttggtgctctaagtccaggcagcctgcaggctggggaccctgggtgcaggtgccaggctcgaggctgttccctgtcctgcctcagtgcctcccctctgcccagcccctgtggcctcttggagaggcgagccagggggctccccggaccgcatggccggtgagagtagagtcggaggcggagagcctggacgcccagaggccggggccaggctctgggtcaaggcaggaaggagacagacagctggcagttcctcgcctcggtgccatcagggaggagccttaagttccactagagcctccggcccagggaggccagaatcagcacaatcccggccccgccctcgcggcgggcgcccccagggccaggagagagagacagggctggctcctctcgcccctggagccgcggtgtggacggcccggccccgtccgccccgccgctctgcgggagtgtcctcgggacacacttaaaccttccaagtagcacagaagccccctccacgtcagaggccccctggccgcggggcctgtgagcggagaggggccctgcttcccacacaaatccgccccggtgcacccccggccaggcaggccccggggcggcctaggcgccttgtcggccgggggtggggctgcttttgcttcctttagaggggcgggcagggagaggaagctctagctccgggcctgagtttccccgaggctgcgtcggaggagctgcagggcgagcccggacggctgccgtctccgccagaggccaccccggcccggcctccagggcgcagaggcgcccccctccatcctcccccatcccgggggccacggcaggggggccgcacagcgcggctgggaccgattcggtgacggcccaaggaagctgggcgcagggctcgcctctcccgcctcgatcctgcaccttcctctcccaggtcgctgctgcagccaacccagtagcccccttagcgcccccgcggaccccgcagctccagactccgctttggcacctctgctccggctggcatggctgcacgctccggctgctagtaggagccgttaggggaggagtttggggtctccacacgatgcctagagaatgctgcagtctgcacattagacgctttttagaagttttgaaattaccttgatttttttaattgttatgaaaatggatcttttcttgactctcccacatgctctgttatgggagagaatcccctaccctactctgatgtatagaccattctcccttcaccagccgaaccaatgtcaaaattaataaagaaatggactaatggca

SEQ ID NO: 13459 - protein, 1881 aa, Homo sapiens
  ref <308>: DATABASE ACCESSION NUMBER: Refseq / XP_016774
  ref <309>: DATABASE ENTRY DATE: 2002-08-01
MPYSVGFREADAATSFLRAARSGNLDKALDHLRNGVDINTCNQNGLNGLHLASKEGHVKMVVELLHKEIILETTTKKGNTALHIAALAGQDEVVRELVNYGANVNAQSQKGFTPLYMAAQENHLEVVKFLLENGANQNVATEDGFTPLAVALQQGHENVVAHLINYGTKGKVRLPALHIAARNDDTRTAAVLLQNDPNPDVLSKTGFTPLHIAAHYENLNVAQLLLNRGASVNFTPQNGITPLHIASRRGNVIMVRLLLDRGAQIETKTKDELTPLHCAARNGHVRISEILLDHGAPIQAKTKNGLSPIHMAAQGDHLDCVRLLLQYDAEIDDITLDHLTPLHVAAHCGHHRVAKVLLDKGAKPNSRALNGFTPLHIACKKNHVRVMELLLKTGASIDAVTESGLTPLHVASFMGHLPIVKNLLQRGASPNVSNVKVETPLHMAARAGHTEVAKYLLQNKAKVNAKAKDDQTPLHCAARIGHTNMVKLLLENNANPNLATTAGHTPLHIAAREGHVETVLALLEKEASQACMTKKGFTPLHVAAKYGKVRVAELLLERDAHPNAAGKNGLTPLHVAVHHNNLDIVKLLLPRGGSPHSPAWNGYTPLHIAAKQNQVEVARSLLQYGGSANAESVQGVTPLHLAAQEGHAEMVALLLSKQANGNLGNKSGLTPLHLVAQEGHVPVADVLIKHGVMVDATTRMGYTPLHVASHYGNIKLVKFLLQHQADVNAKTKLGYSPLHQAAQQGHTDIVTLLLKNGASPNEVSSDGTTPLAIAKRLGYISVTDVLKVVTDETSFVLVSDKHRMSFPETVDEILDVSEDEGEELISFKAERRDSRDVDEEKELLDFVPKLDQVVESPAIPRIPCAMPETVVIRSEEQEQASKEYDEDSLIPSSPATETSDNISPVASPVHTGFLVSFMVDARGGSMRGSRHNGLRVVIPPRTCAAPTRITCRLVKPQKLSTPPPLAEEEGLASRIIALGPTGAQFLSPVIVEIPHFASHGRGDRELVVLRSENGSVWKEHRSRYGESYLDQILNGMDEELGSLEELEKKRVCRIITTDFPLYFVIMSRLCQDYDTIGPEGGSLKSKLVPLVQATFPENAVTKRVKLALQAQPVPDELVTKLLGNQATFSPIVTVEPRRRKFHRPIGLRIPLPPSWTDNPRDSGEGDTTSLRLLCSVIGGTDQAQWEDITGTTKLVYANECANFTTNVSARFWLSDCPRTAEAVNFATLLYKELTAVPYMAKFVIFAKMNDPREGRLRCYCMTDDKVDKTLEQHENFVEVARSRDIEVLEGMSLFAELSGNLVPVKKAAQQRSFHFQSFRENRLAMPVKVRDSSREPGGSLSFLRKAMKYEDTQHILCHLNITMPPCAKGSGAEDRRRTPTPLALRYSILSESTPGSLSGTEQAEMKMAVISEHLGLSWAELARELQFSVEDINRIRVENPNSLLEQSVALLNLWVIREGQNANMENLYTALQSIDRGEIVNMLEGSGRQSRNLKPDRRHTDRDYSLSPSQMNGYSSLQDELLSPASLGCALSSPLRADQYWNEVAVLDAIPLAATEHDTMLEMSDMQVWSAGLTPSLVTAEDSSLECSKAEDSDATGHEWKLEGALSEEPRGPELGSLELVEDDTVDSDATNGLIDLLEQEEGQRSEEKLPGSKRQDDATGAGQDSENEVSLVSGHQRGQARITHSPTVSQVTERSQDRLQDWDADGSIVSYLQDAAQGSWQEEVTQGPHSFQGTSTMTEGLEPGGSQEYEKVLVSVSEHTWTEQPEAESSQADRDRRQQGQEEQVQEAKNTFTQVVQGNEFQNIPGEQVTEEQFTDEQGNIVTKKIIRKVVRQIDLSSADAAQEHEEVTVEGPLEDPSELEVDIDYFMKHSKDHTSTPNP

SEQ ID NO: 13460 - DNA, 528 bp, Rattus norvegicus
  ref <308>: DATABASE ACCESSION NUMBER: EMBL / AI229031
  ref <309>: DATABASE ENTRY DATE: 1998-11-02
caggcagcagggtcatactctgcccagacacgcacgtactcatccaggtggtgggggcccaggatggaggaatctcgggtgaggtactcgaagttgtccatgatgacagcaacaaagagattcagcatcagaaatgagcaaaggaagatgaacgagacaaagtaaaaataggcgaactcgttgccacactctggtttttggatcccggagttcttgtcgcatggcttcccgctgaggcaggacagcatgatgttgtgccacgcttcccctgtggcgctccggaagagaagcatgagagcttggaagaaggtccggaagttattgtgctccgtgatttggaactcatcctcatcgctgtcctcatcttccccatcaatgccgatgttgccaaacacctgcatcccgatgatggcatagatgaagaagagcatggcgatcagcagacagacataaggtagggccttgaaagactgcacgaaagtccagaggagaatgcggatggtgtaaccctggcggaggagtttgatg

SEQ ID NO: 13461 - protein, 2212 aa, Rattus norvegicus
  ref <308>: DATABASE ACCESSION NUMBER: Refseq / NP_037050
  ref <309>: DATABASE ENTRY DATE: 2002-11-14
MARFGDEMPGRYGAGGGGSGPAAGVVVGAAGGRGAGGSRQGGQPGAQRMYKQSMAQRARTMALYNPIPVRQNCLTVNRSLFLFSEDNVVRKYAKKITEWPPFEYMILATIIANCIVLALEQHLPDDDKTPMSERLDDTEPYFIGIFCFEAGIKIVALGFAFHKGSYLRNGWNVMDFVVVLTGILATVGTEFDLRTLRAVRVLRPLKLVSGIPSLQVVLKSIMKAMIPLLQIGLLLFFAILIFAIIGLEFYMGKFHTTCFEEGTDDIQGESPAPCGTEEPARTCPNGTKCQPYWEGPNNGITQFDNILFAVLTVFQCITMEGWTDLLYNSNDASGNTWNWLYFIPLIIIGSFFMLNLVLGVLSGEFAKERERVENRRAFLKLRRQQQIERELNGYMEWISKAEEVILAEDETDVEQRHPFDGALRRATLKKSKTDLLNPEEAEDQLADIASVGSPFARASIKSAKLENSTFFHKKERRMRFYIRRMVKTQAFYWTVLSLVALNTLWLAIVHYNQPEWLSDFLYYAEFIFLGLFMSEMFIKMYGLGTRPYFHSSFNCFDCGVIIGSIFEVIWAVIKPGTSFGISVLRALRLLRIFKVTKYWASLRNLVVSLLNSMKSIISLLFLLFLFIVVFALLGMQLFGGQFNFDEGTPPTNFDTFPAAIMTVFQILTGEDWNEVMYDEIKSQGGVQGGMVFSIYFIVLTLFGNYTLLNVFLAIAVDNLANAQELTKDEQEEEEAANQKLALQKAKEVAEVSPLSAANMSIAVKEQQKNQKPAKSVWEQRTSEMRKQNLLASREALYGDAAERWPTTYARPLRPDVKTHLDRPLVVDPQENRNNNTNKSRAPEALRQTARPRESARDPDARRAWPSSPERAPGREGPYGRESEPQQREHAPPREHVPWDADPERAKAGDAPRRHTHRPVAEGEPRRHRARRRPGDEPDDRPERRPRPRDATRPARAADGEGDDGERKRRHRHGPPAHDDRERRHRRRKESQGSGVPMSGPNLSTTRPIQQDLGRQDLPLAEDLDNMKNNKLATGEPASPHDSLGHSGLPPSPAKIGNSTNPGPALATNPQNAASRRTPNNPGNPSNPGPPKTPENSLIVTNPSSTQPNSAKTARKPEHMAVEIPPACPPLNHTVVQVNKNANPDPLPKKEEEKKEEEEADPGEDGPKPMPPYSSMFILSTTNPLRRLCHYILNLRYFEMCILMVIAMSSIALAAEDPVQPNAPRNNVLRYFDYVFTGVFTFEMVIKMIDLGLVLHQGAYFRDLWNILDFIVVSGALVAFAFTGNSKGKDINTIKSLRVLRVLRPLKTIKRLPKLKAVFDCVVNSLKNVFNILIVYMLFMFIFAVVAVQLFKGKFFHCTDESKEFERDCRGKYLLYEKNEVKARDREWKKYDFHYDNVLWALLTLFTVSTGEGWPQVLKHSVDATFENQGPSPGYRMEMSIFYVVYFVVFPFFFVNIFVALIIITFQEQGDKMMEEYSLEKNERACIDFAISAKPLTRHMPQNKQSFQYRMWQFVVSPPFEYTIMAMIALNTIVLMMKFYGASVAYENALRVFNIVFTSLFSLECVLKVMAFGILNYFRDAWNIFDFVTVLGSITDILVTEFGNNFINLSFLRLFRAARLIKLLRQGYTIRILLWTFVQSFKALPYVCLLIAMLFFIYAIIGMQVFGNIGIDGEDEDSDEDEFQITEHNNFRTFFQALMLLFRSATGEAWHNIMLSCLSGKPCDKNSGIQKPECGNEFAYFYFVSFIFLCSFLMLNLFVAVIMDNFEYLTRDSSILGPHHLDEYVRVWAEYDPAACGRIHYKDMYSLLRVISPPLGLGKKCPHRVACKRLLRMDLPVADDNTVHFNSTLMALIRTALDIKIAKGGADKQQMDAELRKEMMAIWPNLSQKTLDLLVTPHKSTDLTVGKIYAAMMIMEYYRQSKAKKLQAMREEQNRTPLMFQRMEPPSPTQEGGPSQNALPSTQLDPGGGLMAQESSMKESPSWVTQRAQEMFQKTGTWSPERGPPIDMPNSQPNSQSVEMREMGTDGYSDSEHYLPMEGQTRAASMPRLPAENQRRRGRPRGNNLSTISDTSPMKRSASVLGPKARRLDDYSLERVPPEENQRYHQRRRDRGHRTSERSLGRYTDVDTGLGTDLSMTTQSGDLPSKDRDQDRGRPKDRKHRPHHHHHHHHHHPPAPDRERYAQERPDTGRARAREQRWSRSPSEGREHATHRQ

SEQ ID NO: 13462 - DNA, 513 bp, Rattus norvegicus
  ref <308>: DATABASE ACCESSION NUMBER: EMBL / AI229237
  ref <309>: DATABASE ENTRY DATE: 1998-11-02
cactggataagtgtttattatgagcactccttcattaccccagaggcaggttcagggctagctacatgcatggaaatgacacttgttgcatgcttaaatacataaagatatacaaattcacaaagtttcttagcattagcaagaaaactctagagctaacggctcccgcacaagtgtcaaaggaagaaccctggcctccccagaagcccaggtctctctgacacaggaaccagcctaggttctctgcatgacatgaaaccatctgaccgaggtctcagtaaaaggtcagaatctatccaacgttgctggtattttgatatctgacccatagaaagggcgtttacaaaacctcttctgtgaaccatcaaatagatctccaaggtatagactcttcttcccatgccccccattgctattccaaaccataatagtccttgcaaatgagccactttaggcatcagctctcataccaacctccaatttggcagcacactcaggccttactcagatatg

SEQ ID NO: 13463 - protein, 367 aa, Rattus norvegicus
  ref <308>: DATABASE ACCESSION NUMBER: SWISS-Prot / AAF80990
  ref <309>: DATABASE ENTRY DATE: 2001-06-14
MESLFPAPYWEVLYGSHFQGNLSLLNETVPHHLLLNASHSAFLPLGLKVTIVGLYLAVCIGGLLGNCLVMYVILRHTKMKTATNIYIFNLALADTLVLLTLPFQGTDILLGFWPFGNALCKTVIAIDYYNMFTSTFTLTAMSVDRYVAICHPIRALDVRTSSKAQAVNVAIWALASVVGVPVAIMGSAQVEDEEIECLVEIPAPQDYWGPVFAICIFLFSFIIPVLIISVCYSLMIRRLRGVRLLSGSREKDRNLRRITRLVLVVVAVFVGCWTPVQVFVLVQGLGVQPGSETAVAILRFCTALGYVNSCLNPILYAFLDENFKACFRKFCCASSLHREMQVSDRVRSIAKDVGLGCKTSETVPRPA

SEQ ID NO: 13464 - DNA, 2534 bp, Homo sapiens
  ref <308>: DATABASE ACCESSION NUMBER: Refseq / NM_000913
  ref <309>: DATABASE ENTRY DATE: 2002-11-05
cctgctctgcacctgtcgtcgactgccagccggctgagggcgggggtctccacggtggtcccagctcccaaggaggttgcagaagtaccgtacagagtggatttgcagggcagtggcatggagcccctcttccccgcgccgttctgggaggttatctacggcagccaccttcagggcaacctgtccctcctgagccccaaccacagtctgctgcccccgcatctgctgctcaatgccagccacggcgccttcctgcccctcgggctcaaggtcaccatcgtggggctctacctggccgtgtgtgtcggagggctcctggggaactgccttgtcatgtacgtcatcctcaggcacaccaaaatgaagacagccaccaatatttacatctttaacctggccctggccgacactctggtcctgctgacgctgcccttccagggcacggacatcctcctgggcttctggccgtttgggaatgcgctgtgcaagacagtcattgccattgactactacaacatgttcaccagcaccttcaccctaactgccatgagtgtggatcgctatgtagccatctgccaccccatccgtgccctcgacgtccgcacgtccagcaaagcccaggctgtcaatgtggccatctgggccctggcctctgttgtcggtgttcccgttgccatcatgggctcggcacaggtcgaggatgaagagatcgagtgcctggtggagatccctacccctcaggattactggggcccggtgtttgccatctgcatcttcctcttctccttcatcgtccccgtgctcgtcatctctgtctgctacagcctcatgatccggcggctccgtggagtccgcctgctctcgggctcccgagagaaggaccggaacctgcggcgcatcactcggctggtgctggtggtagtggctgtgttcgtgggctgctggacgcctgtccaggtcttcgtgctggcccaagggctgggggttcagccgagcagcgagactgccgtggccattctgcgcttctgcacggccctgggctacgtcaacagctgcctcaaccccatcctctacgccttcctggatgagaacttcaaggcctgcttccgcaagttctgctgtgcatctgccctgcgccgggacgtgcaggtgtctgaccgcgtgcgcagcattgccaaggacgtggccctggcctgcaagacctctgagacggtaccgcggcccgcatgactaggcgtggacctgcccatggtgcctgtcagcccgcagagcccatctacgcccaacacagagctcacacaggtcactgctctctaggcggacacaccctgggccctgagcatccagagcctgggatgggcttttccctgtgggccagggatgctcggtcccagaggaggacctagtgacatcatgggacaggtcaaagcattagggccacctccatggccccagacagactaaagctgccctcctggtgcagggccgaggggacacaaggacctacctggaagcagctgacatgctggtggacggccgttactggagcccgtgcccctccctccccgtgcttcatgtgactcttggcctctctgctgctgcgttggcagaaccctgggtgggcaggcacccggaggaggagcagcagctgtgtcatcctgtgccccccatgtgctgtgtgctgtttgcatggcagggctccagctgccttcagccctgtgacgtctcctcagggcagctggacaggcttggcacggcccgggaagtgcagcaggcagcttttctttggggtgggacttgccctgagcttggagctgccacctggaggacttgcctgttccgactccacctgtgcagccggggccaccccaggagaaagtgtccaggtgggggctggcagtccctggctgcagaccccgagctggccctcggaccgcacctctgaaggttttctgtgtgctgcacggtgcaggcctcatccctgactgcagcttgactctgggcccaacccccatttcccttcaggagaccagcgagaggccctggccatccctccagcggtgcaatgaactatatgctgtggaccgtcaacccagccctgcttctcagtgtggggcaggtgtctcaggacgaaggcgccgcgtgaccacatgggcagctctgttcacaaagtggaggcctcgttttcctggtcttgactgctctgtttgggtgggagaagattctctgggggtccccacatcctcccaaggctcccctcacagcctctcctttgcttgaagccagaggtcagtggccgtgctgtgttgcggggaagctgtgtggaaggagaagctggtggccacagcagagtcctgctctggggacgcctgcttcatttacaagcctcaagatggctctgtgtagggcctgagcttgctgcccaacgggaggatggcttcacagcagagccagcatgaggggtggggcctggcagggcttgcttgagccaaactgcaaaggctgtggtggctgtgaggacactgcgggggttg

SEQ ID NO: 13465 - protein, 370 aa, Homo sapiens
  ref <308>: DATABASE ACCESSION NUMBER: Refseq / NP_000904
  ref <309>: DATABASE ENTRY DATE: 2002-11-05
MEPLFPAPFWEVIYGSHLQGNLSLLSPNHSLLPPHLLLNASHGAFLPLGLKVTIVGLYLAVCVGGLLGNCLVMYVILRHTKMKTATNIYIFNLALADTLVLLTLPFQGTDILLGFWPFGNALCKTVIAIDYYNMFTSTFTLTAMSVDRYVAICHPIRALDVRTSSKAQAVNVAIWALASVVGVPVAIMGSAQVEDEEIECLVEIPTPQDYWGPVFAICIFLFSFIVPVLVISVCYSLMIRRLRGVRLLSGSREKDRNLRRITRLVLVVVAVFVGCWTPVQVFVLAQGLGVQPSSETAVAILRFCTALGYVNSCLNPILYAFLDENFKACFRKFCCASALRRDVQVSDRVRSIAKDVALACKTSETVPRPA

SEQ ID NO: 13466 - DNA, 499 bp, Rattus norvegicus
  misc_feature (1)..(499): n=a, c, g or t
  ref <308>: DATABASE ACCESSION NUMBER: EMBL / AI230256
  ref <309>: DATABASE ENTRY DATE: 1999-01-22
tttttccttttttttttttttttttatttttactttctctttttcttttgcacaacaagaagtctacaggatcttttaagactgttgttttgttctgctttgttatcaaccatttcaccaggagaacaagttgaatggacctttttaaaaagaaaacggaaggaaaactaagagtgatcatctcccccaggtgttctccggcctggactgtgataaccgttatttatgagagactttcaatgccctttctacagtcggaaggttttctttatatacttattcccaccatggggagcgaaaatgttaaaaaaaaaaaaaatcacaaggaattgcccaatctaagcagactttgccttttttcaaaggtggagcgtgaataccagaaggacccagtattcggttacttaaatgaagtctttggtcagaaatggcctttttgacacgagcctactgaatgctgngtatatatttatatataaatatatatatatatatattg

SEQ ID NO: 13467 - protein, 134 aa, Rattus norvegicus
  ref <308>: DATABASE ACCESSION NUMBER: Refseq / NP_037192
  ref <309>: DATABASE ENTRY DATE: 2002-11-05
MKAFSPVRSVRKNSLSDHSLGISRSKTPVDDPMSLLYNMNDCYSKLKELVPSIPQNKKVTKMEILQHVIDYILDLQIALDSHPTIVSLHHQRPGQNQTSRTPLTTLNTDISILSLQASEFPSELMSNDSKVLCG

SEQ ID NO: 13468 - DNA, 499 bp, Rattus norvegicus; identical to SEQ ID NO: 13466
  misc_feature (1)..(499): n=a, c, g or t
  ref <308>: DATABASE ACCESSION NUMBER: EMBL / AI230256
  ref <309>: DATABASE ENTRY DATE: 1999-01-22

SEQ ID NO: 13469 - protein, 134 aa, Rattus norvegicus; identical to SEQ ID NO: 13467
  ref <308>: DATABASE ACCESSION NUMBER: Refseq / NP_037192
  ref <309>: DATABASE ENTRY DATE: 2002-11-05

SEQ ID NO: 13470 - DNA, 430 bp, Rattus norvegicus
  ref <308>: DATABASE ACCESSION NUMBER: EMBL / AI230260
  ref <309>: DATABASE ENTRY DATE: 1999-01-22
catagccttttcttcctttatttcatatccccaccacagtaacaattcctttaatttaaactaaaaaccatagacttcctgaaagggtggcagcggagggacggtggtgtcacaggcagaggaggtgggagggcactcagcgaatcgtcttgactgggctcttgaagttgctggcggcttggagctgcagctggtaggccattggatggatcttgaaaccgtagagcctgggcacaaactggttggccggccgcttgggccggtactcgggatgcaccatgaagagcatgtgagggaaaccagtgccgaagtatgcgccatccgtgtggtggtgcctataggacttgggtgtgtacacgtccatgcacttggggcagtagagcttcaccatggcctctcctgggatgtccgaaaggccgatgggaaacat

SEQ ID NO: 13471 - protein, 215 aa, Rattus norvegicus; identical to SEQ ID NO: 2944
  ref <308>: DATABASE ACCESSION NUMBER: SWISS-Prot / P13862
  ref <309>: DATABASE ENTRY DATE: 2002-06-15

SEQ ID NO: 13472 - DNA, 921 bp, Homo sapiens
  ref <308>: DATABASE ACCESSION NUMBER: EMBL / X16312
  ref <309>: DATABASE ENTRY DATE: 1993-09-12
actccccccaccccacttcgcctgccgcggtcgggtccgcggcctgcgctgtagcggtcgccgccgttccctggaagtagcaacttccctaccccaccccagtcctggtccccgtccagccgctgacgtgaagatgagcagctcagaggaggtgtcctggatttcctggttctgtgggctccgtggcaatgaattcttctgtgaagtggatgaagactacatccaggacaaatttaatcttactggactcaatgagcaggtccctcactatcgacaagctctagacatgatcttggacctggagcctgatgaagaactggaagacaaccccaaccagagtgacctgattgagcaggcagccgagatgctttatggattgatccacgcccgctacatccttaccaaccgtggcatcgcccagatgttggaaaagtaccagcaaggagactttggttactgtcctcgtgtgtactgtgagaaccagccaatgcttcccattggcctttcagacatcccaggtgaagccatggtgaagctctactgccccaagtgcatggatgtgtacacacccaagtcatcaagacaccatcacacggatggcgcctacttcggcactggtttccctcacatgctcttcatggtgcatcccgagtaccggcccaagagacctgccaaccagtttgtgcccaggctctacggtttcaagatccatccgatggcctaccagctgcagctccaagccgccagcaacttcaagagcccagtcaagacgattcgctgattccctcccccacctgtcctgcagtctttgacttttcctttcttttttgccaccctttcaggaaccctgtatggtttttagtttaaattaaaggagtcgttattgtggtgggaatatgaaataaagtagaagaaaaggcc

SEQ ID NO: 13473 - protein, 215 aa, Homo sapiens; identical to SEQ ID NO: 2944

SEQ ID NO: 13474 - DNA, 385 bp, Rattus norvegicus
  ref <308>: DATABASE ACCESSION NUMBER: EMBL / AI230614
  ref <309>: DATABASE ENTRY DATE: 2000-03-03
acaggcaaaatgggcacgtcccaaggctcaatgattatttttttcttttgccatttacagcagaataaatattttgttgctattgctacactttaaatttacattctaacctattaaatgcaaaagctactgtaaagcatatagattaagtgtaggtcccatacgtatgacagtttgttcaagactagtaggtttgtgtatctttttctttaacttattaaatggctattgtgaaagatttgtgcttgtgatcagctcttaacttaaatttttacatcacatcttccctgaaaacagtctttcttactgtccccaatgttctcaccatacgccttacactcaatgcggatttcagtgtccaaggtgaggttggtgaactgcactg

SEQ ID NO: 13475 - protein, 395 aa, Rattus norvegicus
  ref <308>: DATABASE ACCESSION NUMBER: SWISS-Prot / Q9QXL7
  ref <309>: DATABASE ENTRY DATE: 2001-10-16
MKAGQQGRSCGLISPYLAPKNQSERFAFIAEWYDPNASLLRRYELLYYPVDGSVEMHDVKNRRTFLKRTKYEDLRVEDLFIGNKVNVFSRQLVLIDYGDQYTARQLGSRKEKTLALIKPDAVSKAGEIIEMINKSGFTITKLRMMTLSRKEAADFHVDHHSRPFYNELIQFITSGPVIAMEILRDDAICEWKRLLGPANSGIARSEAPGSVRALFGTDGIRNAAHGSDTFESAAREMELFFPSSGGCGPTNTAKFTNCTCCIIKPHAISEGMLGKILIAIRDACFEISAIQMFNMDRANVEEFYEVYKGVLSDYNDMVTELYSGPCVAIEIQQSNPTKTFREFCGPSDPEIARHLRPETLRANFGKTKVQNAVHCTDLPEDGLLEVQYFFKILDN

SEQ ID NO: 13476 - DNA, 1475 bp, Homo sapiens
  ref <308>: DATABASE ACCESSION NUMBER: EMBL / AF153191
  ref <309>: DATABASE ENTRY DATE: 2000-03-07
gctttgttgcctgagtaaccgtatgatggtggtggtggtggtgtcttcctgtctcaacgatacctattttctagtgctgagatcctgagacaatgaatcatagtgaaagattcgttttcattgcagagtggtatgatccaaatgcttcacttcttcgacgttatgagcttttattttacccaggggatggatctgttgaaatgcatgatgtaaagaatcatcgcacctttttaaagcggaccaaatatgataacctgcacttggaagatttatttataggcaacaaagtgaatgtcttttctcgacaactggtattaattgactatggggatcaatatacagctcgccagctgggcagtaggaaagaaaaaacgctagccctaattaaaccagatgcaatatcaaaggctggagaaataattgaaataataaacaaagctggatttactataaccaaactcaaaatgatgatgctttcaaggaaagaagcattggattttcatgtagatcaccagtcaagaccctttttcaatgagctgatccagtttattacaactggtcctattattgccatggagattttaagagatgatgctatatgtgaatggaaaagactgctgggacctgcaaactctggagtggcacgcacagatgcttctgaaagcattagagccctctttggaacagatggcataagaaatgcagcgcatggccctgattcttttgcttctgcggccagagaaatggagttgttttttccttcaagtggaggttgtgggccggcaaacactgctaaatttactaattgtacctgttgcattgttaaaccccatgctgtcagtgaaggactgttgggaaagatcctgatggctatccgagatgcaggttttgaaatctcagctatgcagatgttcaatatggatcgggttaatgttgaggaattctatgaagtttataaaggagtagtgaccgaatatcatgacatggtgacagaaatgtattctggcccttgtgtagcaatggagattcaacagaataatgctacaaagacatttcgagaattttgtggacctgctgatcctgaaattgcccggcatttacgccctggaactctcagagcaatctttggtaaaactaagatccagaatgctgttcactgtactgatctgccagaggatggcctattagaggttcaatacttcttcaagatcttggataattagtggtgtggaaagtaaagaagtcacaggttgggacatttagacaagagtgaatcacacacgaggaatgtgttcattcttttattgtccgttgttttaacctgactgaatacaagatcaacaagagcactgtactcctggcaattattacatatgttagaacatggattttgcactgtagacaacatttaacaccagtctatggggtactgcattgctttttataaagttcaaaataaagatttattttcaaac

SEQ ID NO: 13477 - protein, 376 aa, Homo sapiens
  ref <308>: DATABASE ACCESSION NUMBER: SWISS-Prot / Q9Y5B8
  ref <309>: DATABASE ENTRY DATE: 2001-10-16
MNHSERFVFIAEWYDPNASLLRRYELLFYPGDGSVEMHDVKNHRTFLKRTKYDNLHLEDLFIGNKVNVFSRQLVLIDYGDQYTARQLGSRKEKTLALIKPDAISKAGEIIEIINKAGFTITKLKMMMLSRKEALDFHVDHQSRPFFNELIQFITTGPIIAMEILRDDAICEWKRLLGPANSGVARTDASESIRALFGTDGIRNAAHGPDSFASAAREMELFFPSSGGCGPANTAKFTNCTCCIVKPHAVSEGLLGKILMAIRDAGFEISAMQMFNMDRVNVEEFYEVYKGVVTEYHDMVTEMYSGPCVAMEIQQNNATKTFREFCGPADPEIARHLRPGTLRAIFGKTKIQNAVHCTDLPEDGLLEVQYFFKILDN

SEQ ID NO: 13478 - DNA, 385 bp, Rattus norvegicus; identical to SEQ ID NO: 13474
  ref <308>: DATABASE ACCESSION NUMBER: EMBL / AI230614
  ref <309>: DATABASE ENTRY DATE: 2000-03-03

SEQ ID NO: 13479 - protein, 395 aa, Rattus norvegicus; identical to SEQ ID NO: 13475
  ref <308>: DATABASE ACCESSION NUMBER: SWISS-Prot / Q9QXL7
  ref <309>: DATABASE ENTRY DATE: 2001-10-16

SEQ ID NO: 13480 - DNA, 1475 bp, Homo sapiens; identical to SEQ ID NO: 13476
  ref <308>: DATABASE ACCESSION NUMBER: EMBL / AF153191
  ref <309>: DATABASE ENTRY DATE: 2000-03-07

SEQ ID NO: 13481 - protein, 376 aa, Homo sapiens; identical to SEQ ID NO: 13477
  ref <308>: DATABASE ACCESSION NUMBER: SWISS-Prot / Q9Y5B8
  ref <309>: DATABASE ENTRY DATE: 2001-10-16

SEQ ID NO: 13482 - DNA, 601 bp, Rattus norvegicus
  ref <308>: DATABASE ACCESSION NUMBER: EMBL / AI231500
  ref <309>: DATABASE ENTRY DATE: 2000-03-03
aaaaatcaaacatgaggttttattctttgtttagttgcagaaaataaatacagccacatacactatatgccctttataaaagcgtttctaaaaagatcatgtattggaaccaacagtacctttctgactgtaggcagtagacagcagatcattttacttaactttttgaacagttggatcaagcaactttaaaaaaaggctgagcttaaaaatctcactcaagtgtattatttaaaatggttacactaaaaacaatcaggttttaacttcttttatttaagaggaggtctttctgttataaaaattatcccccaaactcacaaaaacctaaaccaacattaagaaagctggtccttgtaccttcacaggaatcaatcaggaagatgtcaggaagggagggtcaagtatctagctgggcatgggccttccagcatatatgctgggcctcccacttgacctgtgggagttctgccataggagaactgttcagtcatctaagcctatgtttctgaaaaggtaggacatggactccccgttgtgaattcggcggatggcttctgagaggatcatgctgatgtccacagtcttgatcttggggcac

SEQ ID NO: 13483 - protein, 369 aa, Rattus norvegicus
  ref <308>: DATABASE ACCESSION NUMBER: SWISS-Prot / BAA19517
  ref <309>: DATABASE ENTRY DATE: 2002-06-15
MFCVAPPELETKMNITKGGLVLFSANSNSSCMELSKKIAERLGVEMGKVQVYQEPNRETRVQIQESVRGKDVFIIQTVSKDVNTTIMELLIMVYACKTSCAKSIIGVIPYFPYSKQCKMRKRGSIVSKLLASMMCKAGLTHLITMDLHQKEIQGFFNIPVDNLRASPFLLQYIQEEIPDYRNAVIVAKSPASAKRAQSFAERLRLGIAVIHGEAQDAESDLVDGRHSPPMVRSVAAIHPSLEIPMLIPKEKPPITVVGDVGGRIAIIVDDIIDDVDSFLAAAETLKERGAYKIFVMATHGLLSSDAPRLIEESAIDEVVVTNTIPHEIQKLQCPKIKTVDISMILSEAIRRIHNGESMSYLFRNIGLDD

SEQ ID NO: 13484 - DNA, 1766 bp, Homo sapiens
  ref <308>: DATABASE ACCESSION NUMBER: Refseq / NM_002767
  ref <309>: DATABASE ENTRY DATE: 2002-11-05
attgactttaagcagcaatcagtaaaacattgagctcttcagctccgcctttcttgctctgaaaattggaaaaccaagaaggttttgatgttttgtgtgacgccacctgaattagaaaccaagatgaacataaccaaaggtggtctggtgttgttttcagcaaactcgaattcatcatgtatggagctatcaaagaaaattgcagagcggctaggggtggagatgggcaaagtgcaggtttaccaggaacctaacagagaaacaagagtacaaattcaagagtctgtgaggggaaaagatgttttcatcatccaaactgtttcgaaggacgtgaacaccaccatcatggagctcctgatcatggtgtatgcatgtaagacctcttgtgccaagagcatcattggcgtgataccctactttccttacagcaagcagtgcaagatgagaaaaagaggctccattgtctctaaattgctggcttccatgatgtgcaaagctggtctaactcatcttattactatggatttacaccagaaggaaattcagggcttcttcaatattcctgttgacaatttaagagcatctcccttcttattacagtatattcaagaagagatcccagattacaggaatgcagtaatcgtggccaagtctccagcctcggcgaagagggcacagtcttttgctgagcgcctgcgcctgggaattgcagtgattcatggagaggcgcaggatgccgagtcggacttggtggatggacggcattccccacccatggtcagaagtgtggctgccatccaccccagcctggagatccccatgctgattcctaaagaaaagcccccaatcacggttgtgggtgatgttggaggaaggattgccatcatcgtggatgacatcattgatgatgttgacagctttcttgctgcagcagagaccctgaaggaaagaggtgcatataagatctttgtgatggcaactcatggcttgttgtcttctgacgccccccggcggattgaagagtctgccattgatgaggtggtggtcaccaatacaattccacatgaagtccagaagctccagtgccccaagattaaaactgtggatatcagcatgatcctttcagaggcgatccgtcggatccacaatggggagtccatgtcctaccttttcagaaacataggcttagatgactgagttttcctttaggaaaactcccgagggccaaactggaaacataagagtgactgctcggtgggatggatttcacaggaaccgtcatgcttgttcctccctctcccctgtaacctcacttcttattgattcctaagaagatagaccaactttttatgtcggtttgggtgtttgtgagtttggggagcaatttttataaaagaaaaactttattctcctcttttgaaaaggtaagacctcgttttagttgtaactgtttaaaaaataacacttggaataagatttgtaagctcacaaagccttcttccaaagttgcttgagccaagtgcttaaaaagttaataaaataaaatgatctgtatgatacctgcaattgaaaagccgaaaagattatactgtcaagtccagtaaatgacatttttagagatgcttttgtagacaagcatatggaatatgtgattgtatttattttctgcaactaaaaaaggaataaaaacttgtgtttgtgtgtttttctaaaactttgtgttttggcaatcgttttataactaaaataaaatgaaagctaaatct

SEQ ID NO: 13485 - protein, 369 aa, Homo sapiens
  ref <308>: DATABASE ACCESSION NUMBER: Refseq / NP_002758
  ref <309>: DATABASE ENTRY DATE: 2002-11-05
MFCVTPPELETKMNITKGGLVLFSANSNSSCMELSKKIAERLGVEMGKVQVYQEPNRETRVQIQESVRGKDVFIIQTVSKDVNTTIMELLIMVYACKTSCAKSIIGVIPYFPYSKQCKMRKRGSIVSKLLASMMCKAGLTHLITMDLHQKEIQGFFNIPVDNLRASPFLLQYIQEEIPDYRNAVIVAKSPASAKRAQSFAERLRLGIAVIHGEAQDAESDLVDGRHSPPMVRSVAAIHPSLEIPMLIPKEKPPITVVGDVGGRIAIIVDDIIDDVDSFLAAAETLKERGAYKIFVMATHGLLSSDAPRRIEESAIDEVVVTNTIPHEVQKLQCPKIKTVDISMILSEAIRRIHNGESMSYLFRNIGLDD

SEQ ID NO: 13486 - DNA, 482 bp, Rattus norvegicus
  ref <308>: DATABASE ACCESSION NUMBER: EMBL / AI231519
  ref <309>: DATABASE ENTRY DATE: 2000-03-03
aacattgctatgatttattttatttactttcctttaagtgggcacttggatccactatcagctctataggaactaacattcataactaaaaaatcacacaagcaaacaacagaatgaccactcctctccagcggtgaagatggggctgggcaaagcttatgggtcggggtgtgggatatcaaaatgggtgcagagggtaggaaagatgcacatcttaatgagttagcatagcccttaatcgtaggaaagccctgtcgaggtggcacaggtgaggtgtttcgtcatttccagctctaaaacactcaatgcagcttggttatagcttttgaatcattgtgccaagatatttatggatgcttggaagtgtctcagaaaatcaacccctaatatttaaggatcattgagtctacagagaagaaagctgcctcaagtctagacctggaaactggatttctctgctaccattcctagccattgtcccc

SEQ ID NO: 13487 - protein, 305 aa, Rattus norvegicus
  ref <308>: DATABASE ACCESSION NUMBER: Refseq / NP_061996
  ref <309>: DATABASE ENTRY DATE: 2002-11-05
MACILKRKPALAVSFIALCILLLAMRLANDVTFPLLLNCFGQPKTKWIPLSYTLRQPLQTHYGYINVRTQEPLQLNCNHCAVVSNSGQMVGQKVGEEIDRASCIWRMNNAPTKGFEEDVGYMTMVRVVSHTSVPLLLKNPDYFFKEASTTIYVIWGPFRNMRKDGNGIVYNMLKKTVDAYPDAQIYVTTEQRMTYCDGVFKDETGKDRVQSGSYLSTGWFTFILAMDACYSIHVYGMINETYCTTEGYRKVPYHYYEQGKDECNEYLLHEHAPYGGHRFITEKKVFAKWAKKHRIVFTHPNWTVS

SEQ ID NO: 13488 - DNA, 1276 bp, Homo sapiens
  ref <308>: DATABASE ACCESSION NUMBER: EMBL / AJ271734
  ref <309>: DATABASE ENTRY DATE: 2000-11-13
ttacctatatgtggttccaccgcgtcgactagtacggttgggggttaccgctgggggccatggagctccgagcggcggatcgcgagcctcctgcgaacccagcctgcacgccggttagcattcggccgggagatcggctgtggaatctggaagggcggtgaaaaacctacgtcctgccctcgcccggcctctccattcgtcccccgggtagagaggtgcccggctcccaccccttcccagccccagccctggagacagcagccccctagactactgagggacagcgacacgatgaaggctccgggtcggctcgtgctcatcatcctgtgctccgtggtcttctctgccgtctacatcctcctgtgctgctgggccggcctgcccctctgcctggccacctgcctggaccaccacttccccacaggctccaggcccactgtgccgggacccctgcacttcagtggatatagcagtgtgccagatgggaagccgctggtccgcgagccctgccgcagctgtgccgtggtgtccagctccggccaaatgctgggctcaggcctgggtgctgagatcgacagtgccgagtgcgtgttccgcatgaaccaggcgcccaccgtgggctttgaggcggatgtgggccagcgcacgaccctgcgtgtcgtctcacacacaagcgtgccgctgctgctgcgcaactattcacactacttccagaaggcccgagacacgctctacatggtgtggggccagggcaggcacatggaccgggtgctcggcggccgcacctaccgcacgctgctgcagctcaccaggatgtaccccggcctgcaggtgtacaccttcacggagcgcatgatggcctactgcgaccagatcttccaggacgagacgggcaagaaccggagacagtcgggctccttcctcagcaccggctggttcaccatgatcctcgcgctggagctgtgtgaggagatcgtggtctatgggatggtcagcgacagctactgcagggagaagagccacccctcagtgccttaccactactttgagaagggccggctagatgagtgtcagatgtacctggcacacgagcaagcgccccgaagcgcccaccgcttcatcactgagaaggcggtcttctcccgctgggccaagaagaggcccatcgtgttcgcccatccgtcctggaggactgagtagcttccgtcgtcctgccagccgccatgccgttgcgaggcctccgggatgtcccatcccaagccatcacactccacaa

SEQ ID NO: 13489 - protein, 302 aa, Homo sapiens
  ref <308>: DATABASE ACCESSION NUMBER: SWISS-Prot / CAC07404
  ref <309>: DATABASE ENTRY DATE: 2002-06-15
MKAPGRLVLIILCSVVFSAVYILLCCWAGLPLCLATCLDHHFPTGSRPTVPGPLHFSGYSSVPDGKPLVREPCRSCAVVSSSGQMLGSGLGAEIDSAECVFRMNQAPTVGFEADVGQRSTLRVVSHTSVPLLLRNYSHYFQKARDTLYMVWGQGRHMDRVLGGRTYRTLLQLTRMYPGLQVYTFTERMMAYCDQIFQDETGKNRRQSGSFLSTGWFTMILALELCEEIVVYGMVSDSYCREKSHPSVPYHYFEKGRLDECQMYLAHEQAPRSAHRFITEKAVFSRWAKKRPIVFAHPSWRTE

SEQ ID NO: 13490 - DNA, 566 bp, Rattus norvegicus
  ref <308>: DATABASE ACCESSION NUMBER: EMBL / AI232256
  ref <309>: DATABASE ENTRY DATE: 2000-03-03
cagaatttaaaaaaatttacttaaaagaaaaatggggaaagactcaaaactagaccgctgttcccttaactatgtctactgtgaattcaaagtatcagaaatcatgtactgtccccaaaggccatgtcactacaacaaaggaactctaagtcattggcatcaactgttgaaatgaagggaatgagtgggaaccagtgagaagaaaccctgacaaggacacaacgtgagcaggtgctttgggcgtcaggctcaggctgatggacagattctggtcctgcattgaaggaggatagatatctggtcaaccatcttggctccaaggggaaagaaaacaactggcaggatccaaggaaggagcaccctgcagcctacacacaagtctccacctctcactcccaggagatgtgctccgacacttcaacgtggcctcctcaggaggatttgctagcagcccagaagtgacgatacaggaaacctattagaatagcacccacgatggggacaatccaatatgcccaggaactttggcatgaattgttttttgaagggtccttgtcaccatcttt

SEQ ID NO: 13491 - protein, 146 aa, Rattus norvegicus; identical to SEQ ID NO: 10298
  ref <308>: DATABASE ACCESSION NUMBER: SWISS-Prot / P04166
  ref <309>: DATABASE ENTRY DATE: 2002-06-15

SEQ ID NO: 13492 - DNA, 749 bp, Homo sapiens; identical to SEQ ID NO: 10299
  ref <308>: DATABASE ACCESSION NUMBER: EMBL / AB009282
  ref <309>: DATABASE ENTRY DATE: 1997-12-05

SEQ ID NO: 13493 - protein, 146 aa, Homo sapiens; identical to SEQ ID NO: 10300
  ref <308>: DATABASE ACCESSION NUMBER: SWISS-Prot / O43169
  ref <309>: DATABASE ENTRY DATE: 2002-06-15

SEQ ID NO: 13494 - DNA, 363 bp, Rattus norvegicus
  ref <308>: DATABASE ACCESSION NUMBER: EMBL / AI234060
  ref <309>: DATABASE ENTRY DATE: 2000-03-03
aaaatgtgccaatctaatgctgatttaaacactcaaaatccagttatgtgatttgttgtgaaagagtccaaacaaaaccttctttgttgtttttccgtttgccttttaaaatatctaagtcttcctacttaagctaatctacggttttcataggtccaaacaccaggtactgcttcatcctttgggaagtgagcttctttctaatacggtgaaatggtgcagcctgaggcataggcgtgatgtcctgtgtagcgaatttcacagcgtacgacattgttactgtagtctgattcaggcaccaggtagctggggtttacactgacctttagaatgtaatttccgggttgtacatctgtaatatca

SEQ ID NO: 13495 - protein, 411 aa, Rattus norvegicus; identical to SEQ ID NO: 7685
  ref <308>: DATABASE ACCESSION NUMBER: Refseq / NP_058757
  ref <309>: DATABASE ENTRY DATE: 2002-11-05

SEQ ID NO: 13496 - DNA, 1946 bp, Homo sapiens; identical to SEQ ID NO: 7686
  ref <308>: DATABASE ACCESSION NUMBER: Refseq / NM_002317
  ref <309>: DATABASE ENTRY DATE: 2002-11-05

SEQ ID NO: 13497 - protein, 417 aa, Homo sapiens; identical to SEQ ID NO: 7687
  ref <308>: DATABASE ACCESSION NUMBER: Refseq / NP_002308
  ref <309>: DATABASE ENTRY DATE: 2002-11-05

SEQ ID NO: 13498 - DNA, 654 bp, Rattus norvegicus
  ref <308>: DATABASE ACCESSION NUMBER: EMBL / AI235506
  ref <309>: DATABASE ENTRY DATE: 2000-03-03
aaaatagttatttttaacaaagaaaattaattttcaaataagctgacactatctggaaatacctgtgttccctgcaagccccccacccccgagtgtccaccccttcactctcccaggacctgagcctgacacggagtcagacgtgtgcaagagcgagcgtctctgagagccttcacagaacgctgcccggcaggacaggcagcggactctcgcttacagtacgatgcacagggccggggcagttcagatgggcgtctccttccggtctttgctgggcgagggcttcgcctgctccttggctgctctcacctcgaggacaccttcacagggtagtgggcctgtgccccctcgcctctcgggctcctcctcctcctggagctgctgctcagacttggctcgcagcatctggagcagccggagctgcactcggagctcaacgatggcctcccgctcttcatggactgcctggttcaagtgattgttctttatttctaactcttcattctgcctctgtaagtcttccagaatgatctgcagctcctcctcatcctcgctctcgctctcgctgtcagaggagtactcctctgtctcgctgcggccatgctggcgactctggatctccgcaatctcagctcggaggcggtcaatctcttc

SEQ ID NO: 13499 - protein, 693 aa, Rattus norvegicus; identical to SEQ ID NO: 8989
  ref <308>: DATABASE ACCESSION NUMBER: Refseq / NP_114456
  ref <309>: DATABASE ENTRY DATE: 2001-05-16

SEQ ID NO: 13500 - DNA, 4230 bp, Homo sapiens
  ref <308>: DATABASE ACCESSION NUMBER: Refseq / NM_006788
  ref <309>: DATABASE ENTRY DATE: 2002-11-05
ggtcgcgcggcggcaggcacaggtgtaatggataggtaacagagaagacctcgtcccttcctagtcagggcatcagcatgactgagtgcttcctgccccccaccagcagccccagtgaacaccgcagggtggagcatggcagcgggcttacccggacccccagctctgaagagatcagccctactaagtttcctggattgtaccgcactggcgagccctcacctccccatgacatcctccatgagcctcctgatgtagtgtctgatgatgagaaagatcatgggaagaaaaaagggaaatttaagaaaaaggaaaagaggactgaaggctatgcagcctttcaggaagatagctctggagatgaggcagaaagtccttctaaaatgaagaggtccaagggaatccatgttttcaagaagcccagcttttctaaaaagaaggaaaaggattttaaaataaaagagaaacccaaagaagaaaagcataaagaagaaaagcacaaagaagaaaaacataaagagaagaagtcaaaagacttgacagcagctgatgttgttaaacagtggaaggaaaagaagaaaaagaaaaagccaattcaggagccagaggtgcctcagattgatgttccaaatctcaaacccatttttggaattcctttggctgatgcagtagagaggaccatgatgtatgatggcattcggctgccagccgttttccgtgaatgtatagattacgtagagaagtatggcatgaagtgtgaaggcatctacagagtatcaggaattaaatcaaaggtggatgagctaaaagcagcctatgaccgggaggagtctacaaacttggaagactatgagcctaacactgtagccagtttgctgaagcagtatttgcgagaccttccagagaatttgcttaccaaagagcttatgcccagatttgaagaggcttgtgggaggaccacggagactgagaaagtgcaggaattccagcgtttactcaaagaactgccagaatgtaactatcttctgatttcttggctcattgtgcacatggaccatgtcattgcaaaggaactggaaacaaaaatgaatatacagaacatttctatagtgctcagcccaactgtgcagatcagcaatcgagtcctgtatgtgtttttcacacatgtgcaagaactctttggaaatgtggtactaaagcaagtgatgaaacctctgcgatggtctaacatggccacgatgcccacgctgccagagacccaggcgggcatcaaggaggagatcaggagacaggagtttcttttgaattgtttacatcgagatctgcagggtgggataaaggatttgtctaaagaagaaagattatgggaagtacaaagaattttgacagccctcaaaagaaaactgagagaagctaaaagacaggagtgtgaaaccaagattgcacaagagatagccagtctttcaaaagaggatgtttccaaagaagagatgaatgaaaatgaagaagttataaatattctccttgctcaggagaatgagatcctgactgaacaggaggagctcctggccatggagcagtttctgcgccggcagattgcctcagaaaaagaagagattgaacgcctcagagctgagattgctgaaattcagagtcgccagcagcacggccgaagtgagactgaggagtactcctccgagagcgagagcgagagtgaggatgaggaggagctgcagatcattctggaagacttacagagacagaacgaagagctggaaataaagaacaatcatttgaatcaagcaattcatgaggagcgcgaggccatcatcgagctgcgcgtgcagctgcggctgctccagatgcagcgagccaaggccgagcagcaggcgcaggaggacgaggagcctgagtggcgcgggggtgccgtccagccgcccagagacggcgtccttgagccaaaagcagctaaagagcagccaaaggcaggcaaggagccggcaaagccatcgcccagcagggataggaaggagacgtccatctgagcagcctgcgtggccgtctggagtccgtgagactgaaaggacccgtgcatcttactgtaacccgggggccaggccggctctctcgctgtacattctgtaaaggtgtcttctcttctcagactcttcctctgtcacacgtctgactccttcacgtcaggctcaggttccatgggaggacgaagcagtggacgcattgtgggctttagggacagatgagttttccagatagtgtcagcttatttgaagattaattttctttgttaacttaaaataactattttaacccttgagtggcttctttttaaaccaaaaatcgtctttctttgcttttttatcacagcagaatcaggatctctttctcattcaaggggggaaccacaccaggtcagcgctgcgcctgctgtggccgccgcgagccacgccctctgggatctctggtaccgtcactcttgcttgtgccttccacaccttctcggtgcagatccctatgggggagctgcctcacgttctctgactggtcagagcagcgcctggtgggtgttccctggcccactctcctctctccttctgcagttctaaaccacagtctataagcccgagtcaccaggacggcctgtctggccacagacaggggctgcctgtggagcctgcccaccggcccccggcagtgcagtccagcggggaggaggctgcccgttcctgccagttcctcactgcggggaccagcaaaggccttctcactgggttggtcaaaggtagtcaccttggcctggtgcatccacagaggatgttgttcaaaccagaaatcttttaaacgactgaccttccttaaaaacagaatgactccgattgcttgcttgggctagaatgtacacgtctccttgcctgaataagccatatatatgctcttaaacaaaagtttgaaattatccatatcatctcagtgaacctactggtggactcccaattgacaagattgagcaatagaaaaaaattcctttcctttgaatgatagctgtgattcaccccaccccattttcttgtttctggtccatccgatgagacggatgctctgatgctctgaggcttctgggaggctgggccctggaggcaacgtgctgcaggcgcactctgtcagagtgaacagcaccgcgagacaggccaggctcgtggctcggaagacaaaccccacacacactcaaggggtcgaaaacaaaccccacacgagggctctcacctccttctcctaggtagtatttattttcagcacctgtttgatgcagtttttaatcctctacctattgcactgttgtgactcgttggccattatttgatttttgtacgaaaaaaagctttgttatagaaatcagcatactatttttttaaatctggagagaagatattctggtgactgaaagtatggtcgggtgtcagatataaatgtgcaaatgccttcttgctgtcctgtcggtctcagtacgttcactttatagctgctggcaatatcgaaggttccttttttgtttgtgtaaactctaatttctatcaaggtgtcatggatttttaaaattagtatttcattacaaatgtctcagcattggttaactaatttttgccaggaccattattgatcaagcaaataaattcaacagccatttgggaaaaagaaaagcttctagtttttttgtacacattctttctgtgaggagattgagtactctgcagctggcgaggagttggttgaggcacttcttcaaggccaagggggaacacagtgttttgtttccagctcactttgtacccctcacctctgcagacacggggagaaccccggacccctggcatgcatgctggcggcggcatgcctcccttccacaagcccatgctgctgcagagggagcctgtgtttgcaaaacccagtggactgggctgggtctgctgtctgagcagctcctggctccggtgggaactgcacacaagtccactggcctggcttggccccaggcattgcaattgacagacatttgcatttcatacggtaaatgaggactcagcacagccaaccataatcagcatgtctgggatagactggtctagaataaaaatgaagtttccattgctttgtttgctttaaaaattccacaattaaaatatctgtcattgaaagcttaaaaaaaaaaaaaaa

SEQ ID NO: 13501 - protein, 655 aa, Homo sapiens; identical to SEQ ID NO: 8991
  ref <308>: DATABASE ACCESSION NUMBER: Refseq / NP_006779
  ref <309>: DATABASE ENTRY DATE: 2002-11-05

SEQ ID NO: 13502 - DNA, 387 bp, Rattus norvegicus
  ref <308>: DATABASE ACCESSION NUMBER: EMBL / AI235890
  ref <309>: DATABASE ENTRY DATE: 2000-03-03
catatatagctgtgttcagacacatcagaagagagcatcagatctcattacatatggttgtgagccaccatgtggttgctgggatttgaaccaggacctctgtaagagaagtcagtgctcttaacactgagccatctctccagcatttgttttgttttaaaacaatgaccataagaggaatggtggacttctagcttgttctgcctacagtaacaaaagcacatcacacccccagctcacaaacctgtgtgcaatgtcactaccaccacacaacggtactgcgttacactgttggaaaccgcatttccactcagtgcagataaaagcaataggaaacacccagcccagagtcagattattttctgttgtgaagtcaggcctcgtgcc

SEQ ID NO: 13503 - protein, 284 aa, Rattus norvegicus
  ref <308>: DATABASE ACCESSION NUMBER: SWISS-Prot / CAA34850
  ref <309>: DATABASE ENTRY DATE: 2003-02-01
WERETRKARDTGRNFKVNLRTLLRYYNQSDDESHTLQWMYGCDVGPDGHLLRGYCQEAYDGRDYISLNEDLRSWTATDMASQASKIKSEEVGEAHHQRAYLQGPCVEWLHTYLHLGKETLLRSDPPKAHVTLHPRPEGDVTLRCWALGFYPADITLTWQLNGEDLTQDMELVETRPAGDGTFQKWAAVVVPSGEELKYTCHVEHEGLPEPLALRWEPSPFTDSSMPVIVVLGAVAIIGAVAIIGAVAIIGAVVRRRKRNTGEKGSYAHVLGSKAFQISDWPQKA

SEQ ID NO: 13504 - DNA, 345 bp, Rattus norvegicus
  ref <308>: DATABASE ACCESSION NUMBER: EMBL / AI236721
  ref <309>: DATABASE ENTRY DATE: 2000-03-03
aaaaccaattgtgtagtagtggtaagagggtgtggcttgaaaaagaataatgtgaatagaaaataccagaaaatatctcaatcttttcccggtaggctcggaccatctctatcttcttctcgttgccatccgcagacgtcttctgctcgatgctgctgatgaccctccaggaggagcggcgagccccaaccacgttcttgtaggccaccgacaggaggttccgttcctcgttggacagtggttcattcagctctgtcacgttcttcatggccgcggccatatcgtcgtagcgctccgcctgctcggccagccgggctttctgcactagttgctcgccctcgtgcc

SEQ ID NO: 13505 - protein, 246 aa, Rattus norvegicus
  ref <308>: DATABASE ACCESSION NUMBER: PIR / B49023
  ref <309>: DATABASE ENTRY DATE: 2000-07-21
VDREQLVQKARLAEQAERYDDMAAAMKNVTELNEPLSNEERNLLSVAYKNVVGARRSSWRVISSIEQKTSADGNEKKIEMVRAYREKIEKELEAVCQDVLSLLDNYLIKNCSETQYESKVFYLKMKGDYYRYLAEVATGEKRATVVESSEKAYSEAHEISKEHMQPTHPIRLGLALNYSVFYYEIQNAPEQACHLAKTAFDDAIAELDTLNEDSYKDSTLIMQLLRDNLTLWTSDQQDDDGGEGNN

SEQ ID NO: 13506 - DNA, 744 bp, Homo sapiens
  ref <308>: DATABASE ACCESSION NUMBER: EMBL / AF142498
  ref <309>: DATABASE ENTRY DATE: 2000-03-03
atggtggaccccgagcaactggtgcagaaagcccggctggccgagcaggcggagggctacgacgacatggccgcggccatgaagaacgtgacagagctgaatgagccactgtcgaatgaggaacgaaaccttctgtctgtggcctacaagaacgttgtgggggcacgccgctcttcctggagggtcatcagtagtattgagcagaagacatctgcagacggcaatgagaagattgagatggtccgtgcgtaccgggagaaggtagagaaggagttggaggctgtgtgccaggatgtgctgagcctggtggataactacctgtacaagaattgcagcgagacccagtacgagcgcaaagatttgtacctgaagatgaaaggggactactaccgctacctggctgaagtggccaccggagagaaaaggggcgacgtggtggagtcctccgagaaggcctacagcgaacgcgagatcagcaaagagcacatgcagcccacccaccccatccgattaggtctggctcttaactactccgtcttctactatgagatccagaacgccccagagcaagcgtgccacttggccaagaccgagttcgaggacgccatcgccgagcttgacaccctcaacgaggagtcctacaaggactccacgctcatcatgcagctcctccgcgacaacctcacgctctggacgagcgaccagcaggacgaccacgatggaggagaaggcaacaacaactaa

SEQ ID NO: 13507 - protein, 246 aa, Homo sapiens; identical to SEQ ID NO: 13505
  ref <308>: DATABASE ACCESSION NUMBER: SWISS-Prot / Q9UN99
  ref <309>: DATABASE ENTRY DATE: 2002-06-15

SEQ ID NO: 13508 - DNA, 341 bp, Rattus norvegicus
  ref <308>: DATABASE ACCESSION NUMBER: EMBL / H31722
  ref <309>: DATABASE ENTRY DATE: 2000-03-04
tttggtgtcatttcactcagaagtttaatgagataggttgttgaagacgacaaagacgactcccgggagacaaaccccattgccacaaacatggaattcgggagtaactgtggctcctcaggcctccctcccacctcagcacccactgacaaagagggatcagtgtcgggaacaggacaaggaggtgccaggaagatgaaagaatggaaaacgtgaacctgcaggctctggctaggacggaaacagaaaggcagtgcggctgggtgagcaccgacactgtgggccgacgaatgagtatgtcaggggttacacagggaaggaaggacggacgtgggagctat

SEQ ID NO: 13509 - DNA, 383 bp, Rattus norvegicus
  misc_feature (1)..(383): n=a, c, g or t
  ref <308>: DATABASE ACCESSION NUMBER: EMBL / H33301
  ref <309>: DATABASE ENTRY DATE: 2000-03-04
aaacttattttaaaattttattgtgtatataagtnagggagagggaggttgagatactgagcctgcaagatggctcagttgtgtggaggtcagaagataactgtnctcaccttatcccttgatgcaggggcgctcttgtttctnaggtgtttattctaggttagtcgtcaggaaggctctgggtaattcccctgtccccaattgcctatggcccctggaattgctgggattattaatgtcacattacatcctgattttncttggtttttgaaatggtttgaactacaacttaactctgtagaccaggctgacctcaaattcagagatctgcctgcctctgcctctgcctccgnctcctgagtgctggaactaaaggcctttgg

SEQ ID NO: 13510 - DNA, 430 bp, Rattus norvegicus
  misc_feature (1)..(430): n=a, c, g or t
  ref <308>: DATABASE ACCESSION NUMBER: EMBL / H33448
  ref <309>: DATABASE ENTRY DATE: 2000-03-04
aaccgtaaactttaatgaatatactatttctgactctgtgtgtatgtgtaatccttatagcttgcctctatataacatgcaaatatgcatacagagggatatgaacatatgtgaacatctgcatacaggtatgangtggcaatcagaagacacggttgcattgagcccagcactcacactttttctggtttccctgtttgccagaggatgtggaaaggntcccatcccccttccactggctgaacgatctgtttcctagggtgactggagccgagcgttatccttgaaatacacaggacaatggacagttgtgtacatagagaactgtgagctgatatgaacacctgcagacagcagatgagatattcagactctgagacatcaggactcacaggatcctttactaggaggaagtagagtctacacagga

SEQ ID NO: 13511 - DNA, 395 bp, Rattus norvegicus
  misc_feature (1)..(395): n=a, c, g or t
  ref <308>: DATABASE ACCESSION NUMBER: EMBL / H33486
  ref <309>: DATABASE ENTRY DATE: 2000-03-04
gtgatacaaagtctttatattaactnattccgacagcctctgtccttccttgtcccttctnatcctggtcctcatcagggttactggggtcaggtccccctccacaccaccagagctgtagctgacattcaggatgggcgtggcgcagggagagcaggggaaggtccagctccggctcaccttcatccccgctattggtgggctctggaaacatgcgctggccagaagcagtggccagcagaggcaaggtagggtgaaggctgactccattggtgcagtcgtcctggggcagaaaagtcatcactggctccagctgcttgcagtcactgaacggtccactgatgtcccacacggagacaactccantggtgttgccactcactaggaactgcccg

SEQ ID NO: 13512 - DNA, 1052 bp, Rattus norvegicus
  misc_feature (1)..(1052): n=a, c, g or t
  ref <308>: DATABASE ACCESSION NUMBER: EMBL / S39221
  ref <309>: DATABASE ENTRY DATE: 2000-03-04
cacgagcggcacgaggcagcatcgggaccagtcgcgcagtccgcgctgctgtcctttccgccttttccgcgcgggtgttcgagcagcgccaaacacgcttcagcacctcggacagcatccgccgcgctcgcccggggctcctagagaacccgggggcgcttgaccgcgcgcgggcggcccgcgggtcgtacatcgcgaggtcgtcgcactcgcgcaacccagagccaggcccgctgtgcccggagctcatgagcaccatgcacctgctgacattcgccctgcttttttcctgctccttcgcccgcgccgcctgcgaccccaagatcgtcaacatcggcgcggtgctgagcacgcgcaagcatgaacagatgttccgcgaggcagtaaaccaggccaataagcgacacggctcttggaagatacagctcaacgccacttctgtcacccacaagcccaacgccatacagatggccctgtcagtgtgtgaggacctcatctctagccaggtctacgctatcctagttagccacccgcctactcccaacgaccacttcactcccacccctgtctcctacacagctggcttctacagaatccctgtcctgggactgactacccgaatgtccatctactctgacaagccctctgtccatcacacaggtcggaaagagcaggcccgcagcaccaaatgtaatacaagttgcctgcagccagttgcagaggcggtgaacattctatccctacaatgcactgcccctgaccaccaagagggaaccggtaaaaaactaacctagaagcatcagagggccaagagcagtgtgaatcatgacggtgcggaaggagccatgttcactcaggtatccacctgagtttccttcgcacggtgccgccctactcccaccagtccagcgtctggtttgagatgatgcgagtctacaactggaaccacatcatcctgctggtcagcgacgaccacgagggacgggcanngcagaagcgcttggagacgttgctggaggaacgggagtccaagagtaaaaaaaggaactatg

SEQ ID NO: 13513 - protein, 938 aa, Rattus norvegicus; identical to SEQ ID NO: 2831
  ref <308>: DATABASE ACCESSION NUMBER: SWISS-Prot / AAB22435
  ref <309>: DATABASE ENTRY DATE: 2002-06-15

SEQ ID NO: 13514 - DNA, 5025 bp, Homo sapiens
  ref <308>: DATABASE ACCESSION NUMBER: Refseq / NM_021569
  ref <309>: DATABASE ENTRY DATE: 2001-02-03
ggtaaggctctggaaaagggggcgctgggagcgcattgcgagggggctggagagggagagaggagcggaagctgagggtgtgaaacggctggccccgaacacacctcgcggcgctccagtgattcctggtgtccgacctcagccccagtcagtgcgggtccagtttccaggctctcgcggaaggcctggctgagcacatgcggcagccacggtcgccctccctattcctcttagcccgaggaggggggtcccaagttacatggccacgcagatggggcctctccctcatttctgaaccttgtggggaggggaaccttgaagggagcgccccccagagccatggcttagggcctcccccacccctctggagctccagtctgcaagagtcaggagccgaaatatcgctgactgtgggtgacgactcttgcgcgcacacacacatacaagcgggcacgacgcgttcggtcctattaaaaggcacgcaagggtgcggctgcacgcggtgacacggacccctctaacgtttccaaactgagctccctgcaggtccccgacagcacaggcccctgtcccaggacccctccaggcacgcgctcacacgcacacgcgcgctccccggctcacgcgcgctccgacacacacgctcacgcgaacgcaggcgcacgctctggcgcgggaggcgccccttcgcctccgtgttgggaagcgggggcggcgggaggggcaggagacgttggccccgctcgcgtttctgcagctgctgcagtcgccgcagcgtccggaccggaaccagcgccgtccgcggagccgccgccgccgccgccgggccctttccaagccgggcgctcggagctgtgcccggccccgcttcagcaccgcggacagcgccggccgcgtggggctgagccgagcccccgcgcacgcttcagcgccccttccctcggccgacgtcccgggaccgccgctccgggggagacgtggcgtccgcagcccgcggggccgggcgagcgcaggacggcccggaagccccgcgggggatgcgccgagggccccgcgttcgcgccgcgcagagccaggcccgcggcccgagcccatgagcaccatgcgcctgctgacgctcgccctgctgttctcctgctccgtcgcccgtgccgcgtgcgaccccaagatcgtcaacattggcgcggtgctgagcacgcggaagcacgagcagatgttccgcgaggccgtgaaccaggccaacaagcggcacggctcctggaagattcagctcaatgccacctccgtcacgcacaagcccaacgccatccagatggctctgtcggtgtgcgaggacctcatctccagccaggtctacgccatcctagttagccatccacctacccccaacgaccacttcactcccacccctgtctcctacacagccggcttctaccgcatacccgtgctggggctgaccacccgcatgtccatctactcggacaagagcatccacctgagcttcctgcgcaccgtgccgccctactcccaccagtccagcgtgtggtttgagatgatgcgtgtctacagctggaaccacatcatcctgctggtcagcgacgaccacgagggccgggcggctcagaaacgcctggagacgctgctggaggagcgtgagtccaaggcagagaaggtgctgcagtttgacccagggaccaagaacgtgacggccctgctgatggaggcgaaagagctggaggcccgggtcatcatcctttctgccagcgaggacgatgctgccactgtataccgcgcagccgcgatgctgaacatgacgggctccgggtacgtgtggctggtcggcgagcgcgagatctcggggaacgccctgcgctacgccccagacggcatcctcgggctgcagctcatcaacggcaagaacgagtcggcccacatcagcgacgccgtgggcgtggtggcccaggccgtgcacgagctcctcgagaaggagaacatcaccgacccgccgcggggctgcgtgggcaacaccaacatctggaagaccgggccgctcttcaagagagtgctgatgtcttccaagtatgcggatggggtgactggtcgcgtggagttcaatgaggatggggaccggaagttcgccaactacagcatcatgaacctgcagaaccgcaagctggtgcaagtgggcatctacaatggcacccacgtcatccctaatgacaggaagatcatctggccaggcggagagacagagaagcctcgagggtaccagatgtccaccagactgaagattgtgacgatccaccaggagcccttcgtgtacgtcaagcccacgctgagtgatgggacatgcaaggaggagttcacagtcaacggcgacccagtcaagaaggtgatctgcaccgggcccaacgacacgtcgccgggcagcccccgccacacggtgcctcagtgttgctacggcttttgcatcgacctgctcatcaagctggcacggaccatgaacttcacctacgaggtgcacctggtggcagatggcaagttcggcacacaggagcgggtgaacaacagcaacaagaaggagtggaatgggatgatgggcgagctgctcagcgggcaggcagacatgatcgtggcgccgctaaccataaacaacgagcgcgcgcagtacatcgagttttccaagcccttcaagtaccagggcctgactattctggtcaagaaggagattccccggagcacgctggactcgttcatgcagccgttccagagcacactgtggctgctggtggggctgtcggtgcacgtggtggccgtgatgctgtacctgctggaccgcttcagccccttcggccggttcaaggtgaacagcgaggaggaggaggaggacgcactgaccctgtcctcggccatgtggttctcctggggcgtcctgctcaactccggcatcggggaaggcgcccccagaagcttctcagcgcgcatcctgggcatggtgtgggccggctttgccatgatcatcgtggcctcctacaccgccaacctggcggccttcctggtgctggaccggccggaggagcgcatcacgggcatcaacgaccctcggctgaggaacccctcggacaagtttatctacgccacggtgaagcagagctccgtggatatctacttccggcgccaggtggagctgagcaccatgtaccggcatatggagaagcacaactacgagagtgcggcggaggccatccaggccgtgagagacaacaagctgcatgccttcatctgggactcggcggtgctggagttcgaggcctcgcagaagtgcgacctggtgacgactggagagctgtttttccgctcgggcttcggcataggcatgcgcaaagacagcccctggaagcagaacgtctccctgtccatcctcaagtcccacgagaatggcttcatggaagacctggacaagacgtgggttcggtatcaggaatgtgactcgcgcagcaacgcccctgcgacccttacttttgagaacatggccggggtcttcatgctggtagctgggggcatcgtggccgggatcttcctgattttcatcgagattgcctacaagcggcacaaggatgctcgccggaagcagatgcagctggcctttgccgccgttaacgtgtggcggaagaacctgcagagcaccgggggtggacgcggcgctttgcaaaaccaaaaagacacagtgctgccgcgacgcgctattgagagggaggagggccagctgcagctgtgttcccgtcatagggagagctgagactccccgcccgccctcctctgccccctcccccgcagacagacagacagacggatgggacagcggcccggcccacgcagagccccggagcaccacggggtcgggggaggagcacccccagcctcccccaggctgcgcctgcccgcccgccggttggccggctggccggtccaccccgtcccggccccgcgcgtgcccccagcgtggggctaacgggcgccttgtctgtgtatttctattttgcagcagtaccatcccactgatatcacgggcccgctcaacctctcagatccctcggtcagcaccgtggtgtgaggcccccggaggcgcccacctgcccagttagcccggccaaggacactgatgggtcctgctgctcgggaaggcctgagggaagcccacccgccccagagactgcccaccctgggcctcccgtccgtccgcccgcccaccccgctgcctggcgggcagcccctgctggaccaaggtgcggaccggagcggctgaggacggggcagagctgagtcggctgggcagggcgcagggcgctccggcagaggcagggccctggggtctctgagcagtggggagcgggggctaactggccccaggcggaggggcttggagcagagacggcagccccatccttcccgcagcaccagcctgagccacagtggggcccatggccccagctggctgggtcgcccctcctcgggcgcctgcgctcctctgcagcctgagctccaccctcccctcttcttgcggcaccgcccacccacaccccgtctgccccttgaccccacacgccggggctggccctgccctcccccacggccgtccctgacttcccagctggcagcgcctcccgccgcctcgggccgcctcctccagactcgagagggctgagcccctcctctcctcgtccggcctgcagcccagaacgggcctccccgggggtccccggacgctggctcgggactgtcttcaaccctgccctgcaccttgggcacgggagagcgccacccgcccgcccccgccctcgctccgggtgcgtgaccggcccgccaccttgtacagaaccagcactcccagggcccgagcgcgtgccttccccgtgcggcccgtgcgcagccgcgctctgcccctccgtccccagggtgcaggcgcgcaccgcccaacccccacctcccggtgtatgcagtggtgatgcctaaaggaatgtcacg

SEQ ID NO: 13515 - protein, 901 aa, Homo sapiens
  ref <308>: DATABASE ACCESSION NUMBER: Refseq / NP_067544
  ref <309>: DATABASE ENTRY DATE: 2001-02-03
MSTMRLLTLALLFSCSVARAACDPKIVNIGAVLSTRKHEQMFREAVNQANKRHGSWKIQLNATSVTHKPNAIQMALSVCEDLISSQVYAILVSHPPTPNDHFTPTPVSYTAGFYRIPVLGLTTRMSIYSDKSIHLSFLRTVPPYSHQSSVWFEMMRVYSWNHIILLVSDDHEGRAAQKRLETLLEERESKAEKVLQFDPGTKNVTALLMEAKELEARVIILSASEDDAATVYRAAAMLNMTGSGYVWLVGEREISGNALRYAPDGILGLQLINGKNESAHISDAVGVVAQAVHELLEKENITDPPRGCVGNTNIWKTGPLFKRVLMSSKYADGVTGRVEFNEDGDRKFANYSIMNLQNRKLVQVGIYNGTHVIPNDRKIIWPGGETEKPRGYQMSTRLKIVTIHQEPFVYVKPTLSDGTCKEEFTVNGDPVKKVICTGPNDTSPGSPRHTVPQCCYGFCIDLLIKLARTMNFTYEVHLVADGKFGTQERVNNSNKKEWNGMMGELLSGQADMIVAPLTINNERAQYIEFSKPFKYQGLTILVKKEIPRSTLDSFMQPFQSTLWLLVGLSVHVVAVMLYLLDRFSPFGRFKVNSEEEEEDALTLSSAMWFSWGVLLNSGIGEGAPRSFSARILGMVWAGFAMIIVASYTANLAAFLVLDRPEERITGINDPRLRNPSDKFIYATVKQSSVDIYFRRQVELSTMYRHMEKHNYESAAEAIQAVRDNKLHAFIWDSAVLEFEASQKCDLVTTGELFFRSGFGIGMRKDSPWKQNVSLSILKSHENGFMEDLDKTWVRYQECDSRSNAPATLTFENMAGVFMLVAGGIVAGIFLIFIEIAYKRHKDARRKQMQLAFAAVNVWRKNLQSTGGGRGALQNQKDTVLPRRAIEREEGQLQLCSRHRES

SEQ ID NO: 13516 - DNA, 1052 bp, Rattus norvegicus; identical to SEQ ID NO: 13512
  misc_feature (1)..(1052): n=a, c, g or t
  ref <308>: DATABASE ACCESSION NUMBER: EMBL / S39221
  ref <309>: DATABASE ENTRY DATE: 2000-03-04

SEQ ID NO: 13517 - protein, 938 aa, Rattus norvegicus; identical to SEQ ID NO: 2831
  ref <308>: DATABASE ACCESSION NUMBER: SWISS-Prot / AAB22435
  ref <309>: DATABASE ENTRY DATE: 2002-06-15

SEQ ID NO: 13518 - DNA, 5025 bp, Homo sapiens; identical to SEQ ID NO: 13514
  ref <308>: DATABASE ACCESSION NUMBER: Refseq / NM_021569
  ref <309>: DATABASE ENTRY DATE: 2001-02-03

SEQ ID NO: 13519 - protein, 901 aa, Homo sapiens; identical to SEQ ID NO: 13515
  ref <308>: DATABASE ACCESSION NUMBER: Refseq / NP_067544
  ref <309>: DATABASE ENTRY DATE: 2001-02-03

SEQ ID NO: 13520 - DNA, 2928 bp, Rattus norvegicus
  ref <308>: DATABASE ACCESSION NUMBER: EMBL / S43408
  ref <309>: DATABASE ENTRY DATE: 2000-03-04
gaggttctgccaaacgcagttcacttgcaacaatgctgtggacactacctgtgtgtcttctctcactgagtttttctgcccacattgcagctgtgtccattcagcatctttcgactggacatgaccacgatgatgtagacgttggtgaacaacagaaggacatttcagaaatcaactcagctgcaggcctgaacctttttcaaggggacatccttctgcccagaaccagaaatgccctgagagatccgtcaagcagatggaagccccccattccatacattctggctgacaatctggatctgaacgccaaaggagccatcctcaatgcctttgagatgttccgcctcaagtcttgtgtggacttcaagccctatgagggggagagctcgtacatcatcttccagcagttttctgggtgctggtctatggtcggtgatcaacacgtgggacagaatatttccattggtgagggctgcgactataaggccatcattgaacatgagatcctgcatgctctgggattcttccatgagcagtcaaggactgaccgggatgattatgtgaacatctggtggaatgaaattatgacagattatgaacataatttcaacacgtatgatgacaagaccatcacagacctcaacacaccctatgattatgagtccttgatgcactatgggccattttcatttaacaagaatgaaaccatcccgaccatcactaccaagatccctgagttcaacgccatcattggacagcgcctggatttcagtgccactgatttaacgagactgaatcggatgtacaactgcaccagaacacataccctgctggaccactgtgcgtttgagaagaccaacatctgtggaatgatccaggggaccagagatgatgctgactgggttcatgaggacagcagtcagcctggacaagtggatcacaccttggtgggacggtgcaaagctgctggctacttcatgtacttcaataccagctcgggggtgaccggagaggtagcccttctggagtctcggatcctttaccccaagaggaagcagcagtgtttgcagtttttttataagatgacaggaagcccttcagacagactcctcatctgggtgagaagggacgacaacacgggcaacgtgcgccagctggccaagatccagacttttcaaggagattctgatcacaactggaaaattgctcacgtgacactcaacgaagagaagaaatttcgctatgttttccagggtaccaaaggtgaccctggtaactcagatggcggtatttaccttgatgacatcactctgacagaaaccccctgccctacaggggtttggaccatccggaatatctcccaggtccttgagaacacagtgaaaggggacaggctcgtgagccctaggttctacaattccgagggttatggttttggggtgaccttgtaccccaatggtagaatcaccagtaactctggctacctgggactcgctttccacttgtacagtggggataacgatgtgattctggagtggccagtggagaacgagcaggccataatgaccatcctggaccaggaacctgatgccaggaacaggatgtccttgagtttgatgttcactacctccaagtaccaaacatcttcagctataaatggctctgtcatctgggacaggccaaccaaggttggagtctatgataaggactgtgattgttttagaagcattgactggggttggggtcaggccatttcccaccagatgctgatgagaagaaatttccttaaagatgacaccctcatcatcttcgtggactttaaagaccttacccacttgaggcagactgaagtccccatttccagcagaagcgtgataccccgaggactccttctgcaaggccaggagcctcttgccttgggagactccagaatagccatgatggaggaatccctgccaagaaggctggaccagagacagcccagcagaccaaagcgctcagtggaaaatactggtcccatggaggaccacaactggccacagtacttcagagacccatgtgacccaaacccttgccagaatgaaggcacctgtgtgaacgtaaagggaatggccagctgcaggtgcgtctctgggcatgcctttttctacacaggggagcgctgtcaggctatgcatgtgcacggaagcttgctgggcctgctcattggctgcatcactgctttgatcttcttgaccttcatcacattctccaacacttaccaaaagctgaggcagtgagctgatgtccactagactgcagaagggcctccttcacctagactttccttccagtagtcagtataatttggggatattcttcatcaaacatgtttgaaagagcctccaaaaccaaagccccaaacctcatgtggggctcttgccactccatttctgtacagttctgctatccttctatgagtttctggtgaatccattatgtcctaagataacagtcattgcattttactataaacactttgcttgcttgaccttctccccttaaatcaccaagtctagttgggtaggagcatgttatcctctgctaccacattgaccccagtgctagaagcataccttactggtgtattgtgggtactcagtaagcattaaatgaatgaaccaataagcaagtgaatagctgtggtataataagtctttttttcttcctcatattgtaaaacatatgattaagtctatttgcaggtgtatcagaaccaaatacccagtttacactagatgggaaaactactgtcttattgctcatgtagtttcttgtgaaatgatttcacagattcctctggtcagctgagtttccatggcatgtacttttttcttgttctgattttaaggaaaaggcttaataaaaccattaaatatgaaaaaaaaa

SEQ ID NO: 13521 - protein, 748 aa, Rattus norvegicus
  ref <308>: DATABASE ACCESSION NUMBER: SWISS-Prot / AAB23030
  ref <309>: DATABASE ENTRY DATE: 2002-06-15
MLWTLPVCLLSLSFSAHIAAVSIQHLSTGHDHDDVDVGEQQKDISEINSAAGLNLFQGDILLPRTRNALRDPSSRWKPPIPYILADNLDLNAKGAILNAFEMFRLKSCVDFKPYEGESSYIIFQQFSGCWSMVGDQHVGQNISIGEGCDYKAIIEHEILHALGFFHEQSRTDRDDYVNIWWNEIMTDYEHNFNTYDDKTITDLNTPYDYESLMHYGPFSFNKNETIPTITTKIPEFNAIIGQRLDFSATDLTRLNRMYNCTRTHTLLDHCAFEKTNICGMIQGTRDDADWVHEDSSQPGQVDHTLVGRCKAAGYFMYFNTSSGVTGEVALLESRILYPKRKQQCLQFFYKMTGSPSDRLLIWVRRDDNTGNVRQLAKIQTFQGDSDHNWKIAHVTLNEEKKFRYVFQGTKGDPGNSDGGIYLDDITLTETPCPTGVWTIRNISQVLENTVKGDRLVSPRFYNSEGYGFGVTLYPNGRITSNSGYLGLAFHLYSGDNDVILEWPVENEQAIMTILDQEPDARNRMSLSLMFTTSKYQTSSAINGSVIWDRPTKVGVYDKDCDCFRSIDWGWGQAISHQMLMRRNFLKDDTLIIFVDFKDLTHLRQTEVPISSRSVIPRGLLLQGQEPLALGDSRIAMMEESLPRRLDQRQPSRPKRSVENTGPMEDHNWPQYFRDPCDPNPCQNEGTCVNVKGMASCRCVSGHAFFYTGERCQAMHVHGSLLGLLIGCITALIFLTFITFSNTYQKLRQ

SEQ ID NO: 13522 - DNA, 2920 bp, Homo sapiens
  ref <308>: DATABASE ACCESSION NUMBER: Refseq / NM_005588
  ref <309>: DATABASE ENTRY DATE: 2000-11-01
cttgcagcaatggcttggattagatccacttgcattctcttttttaccttgctttttgcccacatagcagctgtaccgattaagcatcttcctgaagaaaatgtacatgatgcagattttggtgaacagaaggatatttcagaaatcaatttagctgcaggcttggacctctttcaaggggacatcctcttgcagaaatccagaaatggcctgagagacccaaacaccaggtggacgttccccattccttacatcttggctgataatttggggctgaatgctaaaggagccattctgtatgcctttgagatgttccgtctcaagtcctgtgtggatttcaagccctatgaaggagagagctcatatatcatatttcaacagtttgatgggtgctggtctgaggttggtgaccaacatgtgggacagaacatttccattggccaaggatgtgcctataaggccatcatagaacacgagatcctgcatgctttgggattttaccacgagcagtcaaggacggaccgggatgattatgtgaacatctggtgggaccaaattctttcaggttaccagcacaactttgacacctatgatgatagcttaatcacagacctcaatacaccctatgattatgagtctttgatgcactaccagcctttctcatttaacaagaatgcaagtgttcccaccatcacagccaagatccctgagtttaactccattatcggacaacgcctggatttcagtgccattgatttagagaggctgaaccgaatgtacaattgcaccacaactcacactcttttggaccactgtacttttgagaaggcaaacatctgtggaatgattcagggcaccagagatgacactgactgggcccatcaggacagtgctcaggctggagaagtggatcacaccttgttgggacaatgcacaggtgccggctacttcatgcagttcagcaccagctcggggtccgcggaagaggcagccctactggagtctcggattctttacccaaagaggaagcagcagtgcctgcaatttttctataaaatgacgggaagtccttcagacagactcgttgtctgggtcaggagggatgacagcacaggcaatgttcgcaagttggtgaaggtgcagacttttcaaggagatgatgaccacaattggaaaattgcccatgtggtgctcaaagaggaacagaagtttcgctaccttttccagggcacaaaaggcgaccctcagaactcaactgggggaatttacctagatgacatcactctgacagaaaccccctgccccacaggggtctggacagtccggaatttctcccaagtccttgagaacaccagcaaaggggacaagcttcagagccctcgattctacaattcggagggatatggttttggggtaactttatacccaaatagcagagaaagctctggttacttgagacttgcttttcatgtgtgcagtggggagaacgatgctatcctggagtggccggtagaaaacagacaggtgataattaccatccttgaccaggagcctgatgtccggaacaggatgtcctcaagcatggtgttcactacctcgaagtcgcacacatctccagcgataaatgacactgtcatctgggacaggccgtccagggtgggaacctatcatacagactgtaattgttttagaagcatcgacttgggctggagtggtttcatttcccaccaaatgctgaaaaggaggagtttcctgaaaaatgatgacctcatcatatttgtggactttgaagatatcacccacctcagccagactgaagttccctctaaaggcaaaagactgagcccccaaggcctcattctccaaggccaggagcagcaggtctccgaagaaggttcgggaaaggccatgttagaggaagccctacctgtcagcctgagccaggggcagcccagccgacagaagcggtcggtggagaacacaggccccctggaggaccataactggccacagtacttcagagacccatgtgacccaaacccttgccaaaatgacggcatctgtgtgaacgtgaaggggatggcgagctgcaggtgcatctctggacatgctttcttctacacgggggagcgctgtcagtcggccgaggtgcacggcagtgtcctgggcatggtgatcggaggcacggctggcgtgatcttcttgaccttctccatcatcgccatcctttcccaaaggccaaggaagtgacctgcctgctggcattggccagaccacagcagcacctcctccatgcaggccttaactttcccatgttcaatgcagtttggggcagcttttttatcagccttgctttggataggacctccaaggactaagcctccagccccatgtgtgacccttgtcatctctctgccccacataattatgttactttgctatgtgctcctaatgtatctagtgtgtcctgtgacaacactcatcacacttcattgtaaatcacttgttttattgactgtctttcctatagactgtaagctccatgagggcaggcacatgttgttctcattgaccgtgctggccccagtgcctagatgcatggctggcacattgttggcactcaacaatggttgaatgaataaaacaataaatgaatgaataactaagatatagaaactctcatttatattgcagattgaatatatatgatgaaattcttatgttgaatatgttagaatcaaatactcatttttcattagatacagtagtgtcatcactcttttaagatcttgttaaagatttcaaataaaggtacttctggcgagccaggctgcacagcatttgctttcctctgagattctaagagaaggcctttaataaatttaataaatattgagttagcaaaaaaaaaaaaaaaaaa

SEQ ID NO: 13523 - protein, 746 aa, Homo sapiens
  ref <308>: DATABASE ACCESSION NUMBER: Refseq / NP_005579
  ref <309>: DATABASE ENTRY DATE: 2000-11-01
MAWIRSTCILFFTLLFAHIAAVPIKHLPEENVHDADFGEQKDISEINLAAGLDLFQGDILLQKSRNGLRDPNTRWTFPIPYILADNLGLNAKGAILYAFEMFRLKSCVDFKPYEGESSYIIFQQFDGCWSEVGDQHVGQNISIGQGCAYKAIIEHEILHALGFYHEQSRTDRDDYVNIWWDQILSGYQHNFDTYDDSLITDLNTPYDYESLMHYQPFSFNKNASVPTITAKIPEFNSIIGQRLDFSAIDLERLNRMYNCTTTHTLLDHCTFEKANICGMIQGTRDDTDWAHQDSAQAGEVDHTLLGQCTGAGYFMQFSTSSGSAEEAALLESRILYPKRKQQCLQFFYKMTGSPSDRLVVWVRRDDSTGNVRKLVKVQTFQGDDDHNWKIAHVVLKEEQKFRYLFQGTKGDPQNSTGGIYLDDITLTETPCPTGVWTVRNFSQVLENTSKGDKLQSPRFYNSEGYGFGVTLYPNSRESSGYLRLAFHVCSGENDAILEWPVENRQVIITILDQEPDVRNRMSSSMVFTTSKSHTSPAINDTVIWDRPSRVGTYHTDCNCFRSIDLGWSGFISHQMLKRRSFLKNDDLIIFVDFEDITHLSQTEVPSKGKRLSPQGLILQGQEQQVSEEGSGKAMLEEALPVSLSQGQPSRQKRSVENTGPLEDHNWPQYFRDPCDPNPCQNDGICVNVKGMASCRCISGHAFFYTGERCQSAEVHGSVLGMVIGGTAGVIFLTFSIIAILSQRPRK

SEQ ID NO: 13524 - DNA, 2928 bp, Rattus norvegicus; identical to SEQ ID NO: 13520
  ref <308>: DATABASE ACCESSION NUMBER: EMBL / S43408
  ref <309>: DATABASE ENTRY DATE: 2000-03-04

SEQ ID NO: 13525 - protein, 748 aa, Rattus norvegicus; identical to SEQ ID NO: 13521
  ref <308>: DATABASE ACCESSION NUMBER: SWISS-Prot / AAB23030
  ref <309>: DATABASE ENTRY DATE: 2002-06-15

SEQ ID NO: 13526 - DNA, 2920 bp, Homo sapiens; identical to SEQ ID NO: 13522
  ref <308>: DATABASE ACCESSION NUMBER: Refseq / NM_005588
  ref <309>: DATABASE ENTRY DATE: 2000-11-01

SEQ ID NO: 13527 - protein, 746 aa, Homo sapiens; identical to SEQ ID NO: 13523
  ref <308>: DATABASE ACCESSION NUMBER: Refseq / NP_005579
  ref <309>: DATABASE ENTRY DATE: 2000-11-01

SEQ ID NO: 13528 - DNA, 2190 bp, Rattus norvegicus; identical to SEQ ID NO: 7596
  ref <308>: DATABASE ACCESSION NUMBER: EMBL / S46785
  ref <309>: DATABASE ENTRY DATE: 2000-03-04

SEQ ID NO: 13529 - protein, 603 aa, Rattus norvegicus; identical to SEQ ID NO: 7597
  ref <308>: DATABASE ACCESSION NUMBER: SWISS-Prot / P35859
  ref <309>: DATABASE ENTRY DATE: 2001-10-16

SEQ ID NO: 13530 - DNA, 2125 bp, Homo sapiens; identical to SEQ ID NO: 7598
  ref <308>: DATABASE ACCESSION NUMBER: EMBL / M86826
  ref <309>: DATABASE ENTRY DATE: 2000-03-04

SEQ ID NO: 13531 - protein, 605 aa, Homo sapiens; identical to SEQ ID NO: 7599
  ref <308>: DATABASE ACCESSION NUMBER: SWISS-Prot / P35858
  ref <309>: DATABASE ENTRY DATE: 2002-06-15

SEQ ID NO: 13532 - DNA, 1332 bp, Rattus norvegicus
  ref <308>: DATABASE ACCESSION NUMBER: EMBL / S54212
  ref <309>: DATABASE ENTRY DATE: 2000-03-04
caacacatcatcccaggaagactttggtctgcagaggaggataatattgatgtgcttggagagcatctggtggtaacgagatggctgcttctgtcccttgggcctgctgtgctgtgcttgccgctgccgctgccgctgtctacacccagaaacacagtccacaggaggcaccccatgttcagtatgagcgtctgggcacagatgtgacgctgccatgtgggacagcaagttgggacgcagctgtgacctggagggtaaatggaacagatctggcccctgacctgctcaatggctctcagctgatactacgaagcttagaactgggccacagtggcctgtatgcctgtttccaccgtgactcctggcacctgcgccaccaagtccttctgcatgtgggtttgccgcctcgggaacccgtgctcagctgccgttccaacacttaccccaagggcttctactgcagctggcacctgtccgcccccacctacatccccaataccttcaatgtgactgtactgcatggctccaaaatgatggtctgtgagaaggacccagccctcaagaaccgctgtcacattcggtacatgcacctgttctcaaccatcaagtacaaggtctccataagtgtcagcaacgccttgggtcacaacaccacggctatcaccttcgacgaattcaccattgtgaagcccgatcctccagaaaatgtggtggcccggccagtgcccagcaacccccgtcgactggaggtgacatggcagaccccctcaacttggcctgatcccgaatcctttccactcaagttttttctgcgctaccggcctctcatcctggatcaatggcagcatgtggagctctcgaatggcacagcccacaccatcacggatgcctatgctgggaaggagtacatcatccaggtggccgccaaggacaatgagattgggacatggagtgactggagtgtggctgctcacgccacaccctggactgaggaaccacggcatctcaccactgaagcccaggcccccgagaccacgaccagcaccaccagctccttggcacccccacccaccacgaagatctgtgaccccggggagctcagcagcggcggaggaccctccatacccttcttgaccagtgtccctgtcactctggtcctggctgccgctgctgccacagccaacaatctcctgatctgagccctgcatcccatgaggacacgccagacgcctacagaggagcaggaggccggagctgagcctgcagaccccggtttctattttgcacacgggcaggaggaccttttgcattctcttcagacacaatttgtag

SEQ ID NO: 13533 - protein, 372 aa, Rattus norvegicus
  ref <308>: DATABASE ACCESSION NUMBER: SWISS-Prot / AAB25290
  ref <309>: DATABASE ENTRY DATE: 2001-10-16
MAASVPWACCAVLAAAAAAVYTQKHSPQEAPHVQYERLGTDVTLPCGTASWDAAVTWRVNGTDLAPDLLNGSQLILRSLELGHSGLYACFHRDSWHLRHQVLLHVGLPPREPVLSCRSNTYPKGFYCSWHLSAPTYIPNTFNVTVLHGSKMMVCEKDPALKNRCHIRYMHLFSTIKYKVSISVSNALGHNTTAITFDEFTIVKPDPPENVVARPVPSNPRRLEVTWQTPSTWPDPESFPLKFFLRYRPLILDQWQHVELSNGTAHTITDAYAGKEYIIQVAAKDNEIGTWSDWSVAAHATPWTEEPRHLTTEAQAPETTTSTTSSLAPPPTTKICDPGELSSGGGPSIPFLTSVPVTLVLAAAAATANNLLI

SEQ ID NO: 13534 - DNA, 1923 bp, Homo sapiens
  ref <308>: DATABASE ACCESSION NUMBER: Refseq / NM_001842
  ref <309>: DATABASE ENTRY DATE: 2002-11-05
ggcacgagggaggcggcggctccagccggcgcggcgcgaggctcggcggtgggatccggcgggcggtgctagctccgcgctccctgcctcgctcgctgccgggggcggtcggaaggcgcggcgcgaagcccgggtggcccgagggcgcgatggctgctcctgtcccgtgggcctgctgtgctgtgcttgccgccgccgccgcagttgtctacgcccagagacacagtccacaggaggcaccccatgtgcagtacgagcgcctgggctctgacgtgacactgccatgtgggacagcaaactgggatgctgcggtgacgtggcgggtaaatgggacagacctggcccctgacctgctcaacggctctcagctggtgctccatggcctggaactgggccacagtggcctctacgcctgcttccaccgtgactcctggcacctgcgccaccaagtcctgctgcatgtgggcttgccgccgcgggagcctgtgctcagctgccgctccaacacttaccccaagggcttctactgcagctggcatctgcccacccccacctacattcccaacaccttcaatgtgactgtgctgcatggctccaaaattatggtctgtgagaaggacccagccctcaagaaccgctgccacattcgctacatgcacctgttctccaccatcaagtacaaggtctccataagtgtcagcaatgccctgggccacaatgccacagctatcacctttgacgagttcaccattgtgaagcctgatcctccagaaaatgtggtagcccggccagtgcccagcaaccctcgccggctggaggtgacgtggcagaccccctcgacctggcctgaccctgagtcttttcctctcaagttctttctgcgctaccgacccctcatcctggaccagtggcagcatgtggagctgtccgacggcacagcacacaccatcacagatgcctacgccgggaaggagtacattatccaggtggcagccaaggacaatgagattgggacatggagtgactggagcgtagccgcccacgctacgccctggactgaggaaccgcgacacctcaccacggaggcccaggctgcggagaccacgaccagcaccaccagctccctggcacccccacctaccacgaagatctgtgaccctggggagctgggcagcggcgggggaccctcggcacccttcttggtcagcgtccccatcactctggccctggctgccgctgccgccactgccagcagtctcttgatctgagcccggcaccccatgaggacatgcagagcacctgcagaggagcaggaggccggagctgagcctgcagaccccggtttctattttgcacacgggcaggaggaccttttgcattctcttcagacacaatttgtggagaccccggcgggcccgggcctgccgccccccagccctgccgcaccaagctggccctccttcctccctcaggggaggtgggccatgcagctaacccacccaccaaagaccccctcaccctggccccttgggctggaccctccaatgccagcgactcccaggagcccttgggggacgtgaggggagcctctcacatccgatttctcctcctgccccagcctcctgtctatcccagggtctctgttgccaccatcagattataagctcctgatgctgggggggcccagccatccccctccccccagcacccacaattttcagtcccctcccctctgccctgttttgtatacccctcccctgaccctgctcctatcccacagtatttaatgccctgtcagtcccttctagtctgactcaatggtaacttgctgtatttgaattttttatagatgtatatacagggtggggggagtgggcggttctcattaaacgtcaccatttcatgaaaaaaaaaaaaaaaaaa

SEQ ID NO: 13535 - protein, 372 aa, Homo sapiens
  ref <308>: DATABASE ACCESSION NUMBER: Refseq / NP_001833
  ref <309>: DATABASE ENTRY DATE: 2002-11-05
MAAPVPWACCAVLAAAAAVVYAQRHSPQEAPHVQYERLGSDVTLPCGTANWDAAVTWRVNGTDLAPDLLNGSQLVLHGLELGHSGLYACFHRDSWHLRHQVLLHVGLPPREPVLSCRSNTYPKGFYCSWHLPTPTYIPNTFNVTVLHGSKIMVCEKDPALKNRCHIRYMHLFSTIKYKVSISVSNALGHNATAITFDEFTIVKPDPPENVVARPVPSNPRRLEVTWQTPSTWPDPESFPLKFFLRYRPLILDQWQHVELSDGTAHTITDAYAGKEYIIQVAAKDNEIGTWSDWSVAAHATPWTEEPRHLTTEAQAAETTTSTTSSLAPPPTTKICDPGELGSGGGPSAPFLVSVPITLALAAAAATASSLLI

SEQ ID NO: 13536 - DNA, 1968 bp, Rattus norvegicus
  ref <308>: DATABASE ACCESSION NUMBER: EMBL / S56481
  ref <309>: DATABASE ENTRY DATE: 2000-03-04
cgcgacacgagatggctccgtggcctcacaaaaacggctctctggctttctggtcagacgcccccaccttggaccccagtgcagccaacaccagtgggttgccaggggtgccatgggcagcggcattggctggagcattgctggcgctggccacggtgggaggcaacctgctggtaatcacagctatcgcccgcacgccgagactacagaccataaccaacgtgttcgtgacttcgctggccacagctgacttggtagtgggactcctcgtaatgccaccaggggccacattggcgctgactggccactggcccttgggcgcaactggctgcgagctgtggacgtcagtggacgtgctctgtgtaactgccagcatcgagaccctgtgcgccctggctgtagaccgctacctagccgtcaccaaccctctgcgttacggcacgctggttaccaagcgccgcgcccgggcggcagtagtcctggtgtggatcgtgtccgccaccgtgtcctttgcgcccatcatgagccagtggtggcgtgtaggggcagacgctgaggcgcaagagtgtcactccaatccgcgctgctgttcctttgcctccaatatgccctacgcgctgctctcctcctccgtctccttctaccttcccctccttgtgatgctcttcgtctatgctcgagtgttcgtcgtagctaagcgccagcggcgtttgctgcgccgggagctgggccgttttccgcccgaggagtctccgcggtctccgtcgcgctctccatcccctgccacagtcgggacacccacggcatcggatggagtgccctcctgcgggcggcggcctgcgcgcctcctaccgctcggggaacaccgcgccctgcgcaccttgggtctcattatgggcatcttctctctgtgctggctgcccttctttctggccaacgtgctgcgcgcactcgtggggccctccctagttcccagcggagttttcatcgccctgaactggttgggctatgccaactctgccttcaacccgctcatctactgccgcagcccggactttcgcgacgccttccgtcgtcttctgtgcagctacggtggccgtggaccggaagagccacgcgtggtcaccttcccagctagccctgttgcgtccaggcagaactcaccgctcaacaggtttgatggctatgaaggtgagcgtccatttcccacatgaaggaccatggagatctagcaaggagcctgacttctggagaaatttttttttaagacagaaagacaagcaacgtccatggatgcaaactttttatacagcccttgatttctgctcagagtgagttcccaggaaccgcaactctccagaaccaatgactagaccacagaatgtaaaggggaaatcttaccaaatgggttttaccatcttctctctctttctgagagacgttgtctaggatccaccttgaacttcgctactacctcagccgccgggatatcaggccacccgtgcttgactgccctgggaggagctgcgttcccaccaccaccctgcttattatgtttgtgctggatgcttagggctaagaaagcacccttacctacctctcttcctactgctttcctgaccccatgaatgacttttgtctccacaaatcactctgtctccaggttctgtgttcccagtctctgtgtctctggttagttggaaagcaggaaacccggcgggggaggcgggggagggggggaacgaccaagtttgaggttttgtccctggctcctcactacagctctctaaacatcatcttggaccatctctcacaataggcacaaaacagctctaatctacctcactcttaggacttcaaggtttgggagaaattccagggttcctgggaagaagtcaaaccattggaatgggtcccttttccacttaaaatcaaattaataaatattattgaatgtgaaaaaaaaaa

SEQ ID NO: 13537 - protein, 400 aa, Rattus norvegicus
  ref <308>: DATABASE ACCESSION NUMBER: SWISS-Prot / AAB25520
  ref <309>: DATABASE ENTRY DATE: 2000-05-30
MAPWPHKNGSLAFWSDAPTLDPSAANTSGLPGVPWAAALAGALLALATVGGNLLVITAIARTPRLQTITNVFVTSLATADLVVGLLVMPPGATLALTGHWPLGATGCELWTSVDVLCVTASIETLCALAVDRYLAVTNPLRYGTLVTKRRARAAVVLVWIVSATVSFAPIMSQWWRVGADAEAQECHSNPRCCSFASNMPYALLSSSVSFYLPLLVMLFVYARVFVVAKRQRRLLRRELGRFPPEESPRSPSRSPSPATVGTPTASDGVPSCGRRPARLLPLGEHRALRTLGLIMGIFSLCWLPFFLANVLRALVGPSLVPSGVFIALNWLGYANSAFNPLIYCRSPDFRDAFRRLLCSYGGRGPEEPRVVTFPASPVASRQNSPLNRFDGYEGERPFPT

SEQ ID NO: 13538 - DNA, 1270 bp, Homo sapiens
  ref <308>: DATABASE ACCESSION NUMBER: EMBL / M29932
  ref <309>: DATABASE ENTRY DATE: 2000-03-04
ttccttctttccctaccgccccacgcgcgacccggggatggctccgtggcctcacgagaacagctctcttgccccatggccggacctccccaccctggcgcccaataccgccaacaccagtgggctgccaggggttccgtgggaggcggccctagccggggccctgctggcgctggcggtgctggccaccgtgggaggcaacctgctggtcatcgtggccatcgcctggactccgagactccagaccatgaccaacgtgttcgtgacttcgctggccgcagccgacctggtgatgggactcctggtggtgccgccggcggccaccttggcgctgactggccactggccgttgggcgccactggctgcgagctgtggacctcggtggacgtgctgtgtgtgaccgccagcatcgaaaccctgtgcgccctggccgtggaccgctacctggctgtgaccaacccgctgcgttacggcgcactggtcaccaagcgctgcgcccggacagctgtggtcctggtgtgggtcgtgtcggccgcggtgtcgtttgcgcccatcatgagccagtggtggcgcgtaggggccgacgccgaggcgcagcgctgccactccaacccgcgctgctgtgccttcgcctccaacatgccctacgtgctgctgtcctcctccgtctccttctaccttcctcttctcgtgatgctcttcgtctacgcgcgggttttcgtggtggctacgcgccagctgcgcttgctgcgcggggagctgggccgctttccgcccgaggagtctccgccggcgccgtcgcgctctctggccccggccccggtggggacgtgcgctccgcccgaaggggtgcccgcctgcggccggcggcccgcgcgcctcctgcctctccgggaacaccgggccctgtgcaccttgggtctcatcatgggcaccttcactctctgctggttgcccttctttctggccaacgtgctgcgcgccctggggggcccctctctagtcccgggcccggctttccttgccctgaactggctaggttatgccaattctgccttcaacccgctcatctactgccgcagcccggactttcgcagcgccttccgccgtcttctgtgccgctgcggccgtcgcctgcctccggagccctgcgccgccgcccgcccggccctcttcccctcgggcgttcctgcggcccggagcagcccagcgcagcccaggctttgccaacggctcgacgggtaggtaaccggggcagagggaccggcg

SEQ ID NO: 13539 - protein, 408 aa, Homo sapiens
  ref <308>: DATABASE ACCESSION NUMBER: SWISS-Prot / AAA35550
  ref <309>: DATABASE ENTRY DATE: 2002-06-15
MAPWPHENSSLAPWPDLPTLAPNTANTSGLPGVPWEAALAGALLALAVLATVGGNLLVIVAIAWTPRLQTMTNVFVTSLAAADLVMGLLVVPPAATLALTGHWPLGATGCELWTSVDVLCVTASIETLCALAVDRYLAVTNPLRYGALVTKRCARTAVVLVWVVSAAVSFAPIMSQWWRVGADAEAQRCHSNPRCCAFASNMPYVLLSSSVSFYLPLLVMLFVYARVFVVATRQLRLLRGELGRFPPEESPPAPSRSLAPAPVGTCAPPEGVPACGRRPARLLPLREHRALCTLGLIMGTFTLCWLPFFLANVLRALGGPSLVPGPAFLALNWLGYANSAFNPLIYCRSPDFRSAFRRLLCRCGRRLPPEPCAAARPALFPSGVPAARSSPAQPRLCQRLDGASWGVS

SEQ ID NO: 13540 - DNA, 817 bp, Rattus norvegicus
  ref <308>: DATABASE ACCESSION NUMBER: EMBL / S58745
  ref <309>: DATABASE ENTRY DATE: 2000-03-04
gggctccttccctctagtcctgaagaagctgatggagaaccccccgcgcgagacgcggctcgataaggaaaaggggaaggaaaagctggaggaagacgagtctgcagcagccagtaccatggccgtctctgcctccctcatgccacccatctgggacaagacaatcccctacgatggcgagtctttccacctagagtacatggacctggatgagttcctgttggagaatggcatccctgccagccccacccacctggcccagaacctgctgctgcctgtggcagagcttgaggggaaggagtctgccagctcttccacagcatcaccaccatcttcctctactgccatcttccagccctcggaaaccgtgtccagcacagaatcatccttggaaaaggagagggagacaccaagtcccatcgaccccaactgtgtggaggttgatgtgaacttcaatcctgaccctgctgacctggtcctctctagtgtaccaggtggggaacttttcaaccctcggaagcacaagtttgcagaggaagacctgaagccccagcctatgatcaagaaagccaagaaagtctttgtccctgatgagcagaaggatgagaagtactggacaaggcgtaagaagaacaatgtggcagctaaacgctcccgggacgccaggcgcctgaaggagaatcagatcaccatccgggcagcatttctggagaaggagaacacagccctgcggacggaggttgctgagcttcgcaaggaggtgggcaagtgcaagaccatcgtgtccaagtatgagaccaagtacgggcccttgtaa

SEQ ID NO: 13541 - protein, 261 aa, Rattus norvegicus
  ref <308>: DATABASE ACCESSION NUMBER: SWISS-Prot / AAB20032
  ref <309>: DATABASE ENTRY DATE: 2000-05-30
MENPPRETRLDKEKGKEKLEEDESAAASTMAVSASLMPPIWDKTIPYDGESFHLEYMDLDEFLLENGIPASPTHLAQNLLLPVAELEGKESASSSTASPPSSSTAIFQPSETVSSTESSLEKERETPSPIDPNCVEVDVNFNPDPADLVLSSVPGGELFNPRKHKFAEEDLKPQPMIKKAKKVFVPDEQKDEKYWTRRKKNNVAAKRSRDARRLKENQITIRAAFLEKENTALRTEVAELRKEVGKCKTIVSKYETKYGPL

SEQ ID NO: 13542 - DNA, 1000 bp, Homo sapiens
  ref <308>: DATABASE ACCESSION NUMBER: Refseq / NM_003216
  ref <309>: DATABASE ENTRY DATE: 2002-11-05
cgggaggcgaggtgcgcgagccgagtccggggcacgatgtccgacgcgggcggcggaaagaagccgcctgtggacccgcaggcaggacccggtccggggccggggcgcgcagctggggaaaggggcctgtcggggtccttccccctggtcctgaagaagctgatggagaaccccccgcgcgaggcgcgcctcgataaggaaaaggggaaggaaaagctggaggaggacgaggccgcagccgccagcaccatggctgtctcagcctccctcatgccacccatctgggacaagaccatcccatatgatggcgaatctttccacctggagtacatggacctggatgagttcctgctggagaatggcatccccgccagccccacccacctggcccacaacctgctgctgcctgtagcagagctagaagggaaggagtctgccagctcttccacagcatccccaccatcctcctccactgccatctttcagccctctgaaaccgtgtccagcacagaatcttccctggagaaggagagggagactcccagtcccatcgaccccaattgtgtggaagtggatgtgaacttcaatccggaccccgccgacctggtgctctccagtgtgccaggcggggagctcttcaaccctcggaagcacaagtttgctgaggaggacctgaagccccagcctatgatcaaaaaggccaagaaggtctttgtccccgacgagcagaaggatgaaaagtactggacaagacgcaagaagaacaacgtggcagctaaacggtcacgggatgcccggcgcctgaaagagaatcagatcaccatccgggcagccttcctggagaaggagaacacagccctgcggacggaggtggccgagctacgcaaggaggtgggcaagtgcaagaccatcgtgtccaagtatgagaccaaatacgggcccttgtaacccgtgccccccgcccgggcggggtactgcctgcacctcagacctctgcctg

SEQ ID NO: 13543 - protein, 303 aa, Homo sapiens
  ref <308>: DATABASE ACCESSION NUMBER: Refseq / NP_003207
  ref <309>: DATABASE ENTRY DATE: 2002-11-05
MSDAGGGKKPPVDPQAGPGPGPGRAAGERGLSGSFPLVLKKLMENPPREARLDKEKGKEKLEEDEAAAASTMAVSASLMPPIWDKTIPYDGESFHLEYMDLDEFLLENGIPASPTHLAHNLLLPVAELEGKESASSSTASPPSSSTAIFQPSETVSSTESSLEKERETPSPIDPNCVEVDVNFNPDPADLVLSSVPGGELFNPRKHKFAEEDLKPQPMIKKAKKVFVPDEQKDEKYWTRRKKNNVAAKRSRDARRLKENQITIRAAFLEKENTALRTEVAELRKEVGKCKTIVSKYETKYGPL

SEQ ID NO: 13544 - DNA, 3056 bp, Rattus norvegicus
  ref <308>: DATABASE ACCESSION NUMBER: Refseq / NM_022847
  ref <309>: DATABASE ENTRY DATE: 2002-11-05
atgactgagctgcaggcaaaggatccgcggactctccacacatctggcgccgcgccctcccccacccacgtcgggtctcccttgcttgcacgcttggacccggatcccttccaggggagtcagcactcggacgcatcgtctgtagtctcgccaataccgatctccctggaccggctgctcttctctcggtcctgccaggctcaggagctcccagacgaaaagacacaaaatcagcagtcgctgtccgacgtggagggagctttctctggagtggaagcctcgcgccgaagaagcagaaatcccagagctccggagaaggacagcagactcttagacagtgtcttagacaccctgttggcgccctcggggcccgagcaaagccaaaccagccctccagcctgcgaggccatcacttcttggtgtctctttgggccagagcttccagaagacccccgcagtgtccccgctaccaaggggttgttgtccccgctcatgagccggccagagagcaaggctggcgacagctccgggacaggagcagggcagaaggtgctgcccaaagcggtgtcaccaccccggcagctgttgctcccgacctcggggagtgctcactggcccggggcaggggtgaagccatctcagcagcctgctacggtggaggtggaggaggacggtggtctcgagaccgagggctctgcgggtccgcttctgaagagcaaacctcgagcactggaaggcatgtgtagcggaggaggagtcacagccaacgcgcccggcgcggccccaggaggcgtcaccttggtccccaaggaagattcccggttttctgctcccagggtctccttggagcaagacgctccagttgcccccgggcgctccccactggccaccacagtggtggatttcattcacgtgcccattctgcctctgaaccacgctctcctagccgcccgcacccggcagctgctggagggagacagctacgacggcggggctgcagcgcaagtcccttttgctccacctcggggctcgccctccgcgccatccccgccggtgccctgcggtgacttcccagactgcacctaccctccagaaggcgaccctaaagaggacgggttcccagtttacggcgaattccagcctcccggcttgaagatcaaggaggaggaggagggcacggaggctgcttcccgctcgccgcgcccctacctgttggccggagccagcgccgccaccttcccagacttcccgctgccgccgcggccgccgcgagcgccaccctccaggcccggagaggcggcggtagccgccccgagcgccgcggtgtcgccagtgtcctcgtcgggctccgcactggagtgcatcctgtacaaagcggagggcgcgccgcccacgcagggttcgttcgccccattgccctgtaaacccccggccgccagctcctgcctgcttccccgggacagcctgcccgccgctccgacctcctcggcagcaccggccatctacccgccgctcggcctcaatgggctccctcagctgggttaccaggccgcggtgctcaaggacagcctgccccaagtctacccgccctacctcaactacctgaggccagattcagaagccagccagagcccacaatatggctttgattccttacctcagaagatctgtttaatctgcggggatgaagcatctggctgtcactatggtgtgcttacctgtgggagctgcaaggtcttctttaagagggcgatggaagggcagcataactatttatgtgccggaagaaatgattgcattgttgataaaatccgcagaaaaaactgtccagcatgtcgtctgagaaagtgctgtcaggctggcatggtccttggaggtcgtaagtttaagaagttcaataaagtccgagttatgagagccctcgatggtgttgctctcccccagtcagtggcctttcctaatgagagccagaccctgggccagagaatcacattttcaccaaatcaagagattcaactggttccgccactcatcaacctgctcatgagcattgaacctgatgtggtttatgcagggcatgacaacacaaagcccgacacttccagctctttgctgaccagtctcaaccaactaggcgagaggcagctgctttcagtagtcaaatggtctaagtctctgccaggtttccggaacttacacatcgatgaccagataaccctgattcagtactcctggatgagcctgatggtgtttggcctggggtggaggtcgtacaagcatgtcagtggacagatgctatattttgcacctgatctaatcctgaatgagcagaggatgaaggagttgtcattctactcgctgtgccttaccatgtggcaaatcccacaggagtttgtcaagctccaggtgacccacgaggagttcctctgtatgaaagtcttacttcttcttaacacaattcctttggaaggcctgaggagtcaaagccagtttgaagagatgaggtcaagctatattcgggaattgatcaaggcaattggcttaagacagaaaggggtggtccccagttcacaacgcttctatcaacttacaaaacttcttgacagcttgcatgatcttgtgaaacagctccacctgtactgcttgaatacgttcatccaatcccgggcactggctgtggaatttccggaaatgatgtctgaagttattgctgcccagttgcccaagatcctggcgggcatggtgaagcctctcctctttcacaaaaagtgatgacttttctttgtttcctctgcaaaaattgaattttgtggtgtgtcattttgtctcagtcaggacagtcagctctgtgtctttataatgtccttctgaaagccttacgtgtatacatatcacactgtaaacttaggagaaaaccaatgaaatttggattttcctttgtgatgtctaagtagaatttttaaagtgttttgtgcacccatattttgagagtttacatggttaaaaaaggactaaagttgattgtataagtaaactatatctcacccgtgttattt

SEQ ID NO: 13545 - protein, 923 aa, Rattus norvegicus
  ref <308>: DATABASE ACCESSION NUMBER: Refseq / NP_074038
  ref <309>: DATABASE ENTRY DATE: 2002-11-05
MTELQAKDPRTLHTSGAAPSPTHVGSPLLARLDPDPFQGSQHSDASSVVSPIPISLDRLLFSRSCQAQELPDEKTQNQQSLSDVEGAFSGVEASRRRSRNPRAPEKDSRLLDSVLDTLLAPSGPEQSQTSPPACEAITSWCLFGPELPEDPRSVPATKGLLSPLMSRPESKAGDSSGTGAGQKVLPKAVSPPRQLLLPTSGSAHWPGAGVKPSQQPATVEVEEDGGLETEGSAGPLLKSKPRALEGMCSGGGVTANAPGAAPGGVTLVPKEDSRFSAPRVSLEQDAPVAPGRSPLATTVVDFIHVPILPLNHALLAARTRQLLEGDSYDGGAAAQVPFAPPRGSPSAPSPPVPCGDFPDCTYPPEGDPKEDGFPVYGEFQPPGLKIKEEEEGTEAASRSPRPYLLAGASAATFPDFPLPPRPPRAPPSRPGEAAVAAPSAAVSPVSSSGSALECILYKAEGAPPTQGSFAPLPCKPPAASSCLLPRDSLPAAPTSSAAPAIYPPLGLNGLPQLGYQAAVLKDSLPQVYPPYLNYLRPDSEASQSPQYGFDSLPQKICLICGDEASGCHYGVLTCGSCKVFFKRAMEGQHNYLCAGRNDCIVDKIRRKNCPACRLRKCCQAGMVLGGRKFKKFNKVRVMRALDGVALPQSVAFPNESQTLGQRITFSPNQEIQLVPPLINLLMSIEPDVVYAGHDNTKPDTSSSLLTSLNQLGERQLLSVVKWSKSLPGFRNLHIDDQITLIQYSWMSLMVFGLGWRSYKHVSGQMLYFAPDLILNEQRMKELSFYSLCLTMWQIPQEFVKLQVTHEEFLCMKVLLLLNTIPLEGLRSQSQFEEMRSSYIRELIKAIGLRQKGVVPSSQRFYQLTKLLDSLHDLVKQLHLYCLNTFIQSRALAVEFPEMMSEVIAAQLPKILAGMVKPLLFHKK

SEQ ID NO: 13546 - DNA, 3014 bp, Homo sapiens
  ref <308>: DATABASE ACCESSION NUMBER: Refseq / NM_000926
  ref <309>: DATABASE ENTRY DATE: 2002-10-20
ctgaccagcgccgccctcccccgcccccgacccaggaggtggagatccctccggtccagccacattcaacacccactttctcctccctctgcccctatattcccgaaaccccctcctccttcccttttccctcctccctggagacgggggaggagaaaaggggagtccagtcgtcatgactgagctgaaggcaaagggtccccgggctccccacgtggcgggcggcccgccctcccccgaggtcggatccccactgctgtgtcgcccagccgcaggtccgttcccggggagccagacctcggacaccttgcctgaagtttcggccatacctatctccctggacgggctactcttccctcggccctgccagggacaggacccctccgacgaaaagacgcaggaccagcagtcgctgtcggacgtggagggcgcatattccagagctgaagctacaaggggtgctggaggcagcagttctagtcccccagaaaaggacagcggactgctggacagtgtcttggacactctgttggcgccctcaggtcccgggcagagccaacccagccctcccgcctgcgaggtcaccagctcttggtgcctgtttggccccgaacttcccgaagatccaccggctgcccccgccacccagcgggtgttgtccccgctcatgagccggtccgggtgcaaggttggagacagctccgggacggcagctgcccataaagtgctgccccggggcctgtcaccagcccggcagctgctgctcccggcctctgagagccctcactggtccggggccccagtgaagccgtctccgcaggccgctgcggtggaggttgaggaggaggatggctctgagtccgaggagtctgcgggtccgcttctgaagggcaaacctcgggctctgggtggcgcggcggctggaggaggagccgcggctgtcccgccgggggcggcagcaggaggcgtcgccctggtccccaaggaagattcccgcttctcagcgcccagggtcgccctggtggagcaggacgcgccgatggcgcccgggcgctccccgctggccaccacggtgatggatttcatccacgtgcctatcctgcctctcaatcacgccttattggcagcccgcactcggcagctgctggaagacgaaagttacgacggcggggccggggctgccagcgcctttgccccgccgcggagttcaccctgtgcctcgtccaccccggtcgctgtaggcgacttccccgactgcgcgtacccgcccgacgccgagcccaaggacgacgcgtaccctctctatagcgacttccagccgcccgctctaaagataaaggaggaggaggaaggcgcggaggcctccgcgcgctccccgcgttcctaccttgtggccggtgccaaccccgcagccttcccggatttcccgttggggccaccgcccccgctgccgccgcgagcgaccccatccagacccggggaagcggcggtgacggccgcacccgccagtgcctcagtctcgtctgcgtcctcctcggggtcgaccctggagtgcatcctgtacaaagcggagggcgcgccgccccagcagggcccgttcgcgccgccgccctgcaaggcgccgggcgcgagcggctgcctgctcccgcgggacggcctgccctccacctccgcctctgccgccgccgccggggcggcccccgcgctctaccctgcactcggcctcaacgggctcccgcagctcggctaccaggccgccgtgctcaaggagggcctgccgcaggtctacccgccctatctcaactacctgaggccggattcagaagccagccagagcccacaatacagcttcgagtcattacctcagaagatttgtttaatctgtggggatgaagcatcaggctgtcattatggtgtccttacctgtgggagctgtaaggtcttctttaagagggcaatggaagggcagcacaactacttatgtgctggaagaaatgactgcatcgttgataaaatccgcagaaaaaactgcccagcatgtcgccttagaaagtgctgtcaggctggcatggtccttggaggtcgaaaatttaaaaagttcaataaagtcagagttgtgagagcactggatgctgttgctctcccacagccagtgggcgttccaaatgaaagccaagccctaagccagagattcactttttcaccaggtcaagacatacagttgattccaccactgatcaacctgttaatgagcattgaaccagatgtgatctatgcaggacatgacaacacaaaacctgacacctccagttctttgctgacaagtcttaatcaactaggcgagaggcaacttctttcagtagtcaagtggtctaaatcattgccaggttttcgaaacttacatattgatgaccagataactctcattcagtattcttggatgagcttaatggtgtttggtctaggatggagatcctacaaacacgtcagtgggcagatgctgtattttgcacctgatctaatactaaatgaacagcggatgaaagaatcatcattctattcattatgccttaccatgtggcagatcccacaggagtttgtcaagcttcaagttagccaagaagagttcctctgtatgaaagtattgttacttcttaatacaattcctttggaagggctacgaagtcaaacccagtttgaggagatgaggtcaagctacattagagagctcatcaaggcaattggtttgaggcaaaaaggagttgtgtcgagctcacagcgtttctatcaacttacaaaacttcttgataacttgcatgatcttgtcaaacaacttcatctgtactgcttgaatacatttatccagtcccgggcactgagtgttgaatttccagaaatgatgtctgaagttattgctgcacaattacccaagatattggcagggatggtgaaaccccttctctttcataaaaagtgaatgtcatctttttcttttaaagaattaaattttgtgg

SEQ ID NO: 13547 - protein, 933 aa, Homo sapiens
  ref <308>: DATABASE ACCESSION NUMBER: Refseq / NP_000917
  ref <309>: DATABASE ENTRY DATE: 2002-10-20
MTELKAKGPRAPHVAGGPPSPEVGSPLLCRPAAGPFPGSQTSDTLPEVSAIPISLDGLLFPRPCQGQDPSDEKTQDQQSLSDVEGAYSRAEATRGAGGSSSSPPEKDSGLLDSVLDTLLAPSGPGQSQPSPPACEVTSSWCLFGPELPEDPPAAPATQRVLSPLMSRSGCKVGDSSGTAAAHKVLPRGLSPARQLLLPASESPHWSGAPVKPSPQAAAVEVEEEDGSESEESAGPLLKGKPRALGGAAAGGGAAAVPPGAAAGGVALVPKEDSRFSAPRVALVEQDAPMAPGRSPLATTVMDFIHVPILPLNHALLAARTRQLLEDESYDGGAGAASAFAPPRSSPCASSTPVAVGDFPDCAYPPDAEPKDDAYPLYSDFQPPALKIKEEEEGAEASARSPRSYLVAGANPAAFPDFPLGPPPPLPPRATPSRPGEAAVTAAPASASVSSASSSGSTLECILYKAEGAPPQQGPFAPPPCKAPGASGCLLPRDGLPSTSASAAAAGAAPALYPALGLNGLPQLGYQAAVLKEGLPQVYPPYLNYLRPDSEASQSPQYSFESLPQKICLICGDEASGCHYGVLTCGSCKVFFKRAMEGQHNYLCAGRNDCIVDKIRRKNCPACRLRKCCQAGMVLGGRKFKKFNKVRVVRALDAVALPQPVGVPNESQALSQRFTFSPGQDIQLIPPLINLLMSIEPDVIYAGHDNTKPDTSSSLLTSLNQLGERQLLSVVKWSKSLPGFRNLHIDDQITLIQYSWMSLMVFGLGWRSYKHVSGQMLYFAPDLILNEQRMKESSFYSLCLTMWQIPQEFVKLQVSQEEFLCMKVLLLLNTIPLEGLRSQTQFEEMRSSYIRELIKAIGLRQKGVVSSSQRFYQLTKLLDNLHDLVKQLHLYCLNTFIQSRALSVEFPEMMSEVIAAQLPKILAGMVKPLLFHKK

SEQ ID NO: 13548 - DNA, 1030 bp, Rattus norvegicus
  ref <308>: DATABASE ACCESSION NUMBER: EMBL / S65091
  ref <309>: DATABASE ENTRY DATE: 2000-06-14
gggcggaaggccgcactgttgccacaatgatttcctgttcttcctttttcaggttgtcgaccatgtgtcaagctgtgtagggaaactgcctggagatggacattctgactgctaatggggacatgggacggcagttacctctgatcacttgcgtggattctcctggagcagaaagacagaagccgccagtcactgctccggatctagcactgggattctgtgctgaagggtctaaaaactcgttttgatttggatctgggagaatgtctgagcaaggagaactaaccccgaccatactggaagaaggccggacagagccagaatctgccccagaaaatggcatcctcaagtcagaaagtctggatgaggaggagaagctggaactgcagcggcgactggcagctcagaaccaagagagaagaaaatccaagtcaggagcaggtaaagggaagctgaccagaagtcttgctgtctgtggaagagtcttcagccagacctggaggggaaagtcaccaggatcagactctctgagaactgcaaacggaaaggaactcaaaagaacttagattaaaacttaacttacaaatgataaaataaaataaaataataaaatccagtaagcacggaagtgctcgatgtccactgaggctctctcttgataaggctgaaccaaatacaccccaagcatcctgtctctatggagacagcttacctctcagctccccaaatgaacctgcctataaataacacaccactgttggctcctaggagatgagaaatagtgtctaagcaccctgaactgtggagaaatgctgctatggccttcgggaggttgttggtttttggtttggtttgtttttttttttttttttttttttaactactgcaaaaccggcccagaagagcgtctgaactggtagcgaatttgatattaaccagctgctgcacctccactctgtgatcccccaaagcttaaagttccagggcccttcgcatcctcttcgttacccttttttttttccttttttaa

SEQ ID NO: 13549 - DNA, 1030 bp, Rattus norvegicus; identical to SEQ ID NO: 13548
  ref <308>: DATABASE ACCESSION NUMBER: EMBL / S65091
  ref <309>: DATABASE ENTRY DATE: 2000-06-14

SEQ ID NO: 13550 - DNA, 2924 bp, Rattus norvegicus
  ref <308>: DATABASE ACCESSION NUMBER: EMBL / S68736
  ref <309>: DATABASE ENTRY DATE: 2000-06-10
cccccgggctgcaggaattcggcacgagggaaactcgagggggacctaaaactggcccaagagtccacaatggacgtagaaaatgacaaacagcagctcgatgagaaactcaaaaagaaagagtttgaaatgagcaacctgcagagcaagatcgaggatgaacaggccctcggcatgcagctgcagaagaagatcaaggagttgcaggctcgcattgaggagctggaggaggaaatcgaggcagagcgggcctccagggccaaagcagagaagcagcgctctgacctctcccgggaactggaggagatcagcgagcggctggaagaagccggcggggccacttcagcccagatcgagatgaacaagaagagagaggccgagttccagaaaatgcgcagggacctggaggaggccaccctgcagcacgaagccacagcagccaccctgaggaagaagcacgcggacagcgtggctgagctcggggagcagatcgacaacctgcagcgggtgaagcagaagctggagaaggagaagagcgagatgaagatggagatcgacgacctcgctagcaacatggaggtcatttccaaatccaagggaaaccttgagaagatgtgccgcactctggaggaccaggtgagcgagctgaagaccaaggaggaggagcagcagcggctcatcaatgagctgaccgcgcagagggggcgtctgcagacagagtcaggtgaatattcacgccagctggatgaaaaggattcattagtttctcagctctccaggggcaaacaggcattcactcaacagattgaggagctgaagaggcagcttgaagaggaagtaaaggccaagagtgccctggctcatgctcttcagtcctcccgccatgactgtgaccttctgcgggaacagtatgaagaagaacaggaagccaaggctgaactgcagagggccatgtccaaggccaacagtgaagtggcccagtggaggacgaaatatgagacggatgccatccagcgcacggaagaactggaggaggccaagaagaagctggctcagcgtctgcaggatgctgaggagcacgtagaagccgtgaacgccaagtgtgcttccctggagaagacgaagcagaggctgcagaatgaggtggaggacctcatgattgatgtggagaggaccaacgctgcctgtgccgccctggacaagaagcagagaaacttcgacaagatcctggcagaatggaaacagaagtatgaggaaacgcatgctgaacttgaagcctcccagaaggagtcccgctctctcagcacagagttgttcaagattaagaatgcttatgaggaatctttagaccaacttgaaaccttgaaaagggaaaataagaatttgcaacaggagatctctgacctcactgaacagattgcagaaggagggaaacgtatccatgaactggaaaaaataaagaagcaaattgagcaagaaaaatccgagctccaggctgctttagaggaagcagaggcatctctggagcacgaggagggaaagatcctgcgcatccagctggagctgaaccaagtcaagtctgagatcgacaggaagattgctgagaaggatgaggaaattgaccagctgaagagaaaccacattcgagtcgtggagtccatgcagagcacgctggatgccgagatcaggagcaggaatgacgccatcaggatcaagaagaagatggagggagacctcaatgagatggaaatccagctgaaccactccaaccgcatggctgctgaggccctgagaaactacaggaacacccaaggcatcctcaaggacacccagttgcacctggatgacgctctccggggccaggaggacctgaaggagcagctggccatggtggagcgcagagccaacctgctgcaggctgagatcgaggagctgcgggccactctggagcagactgagaggagcaggaagattgcagagcaggagctgctggacgccagtgagcgcgtgcagctcctccacacccagaacaccagcctcatcaacaccaagaagaagctggagacagacatttcccagatccagggagagatggaggacatcgtccaggaagcccgcaatgcagaagagaaggccaagaaagccatcactgacgccgccatgatggcggaggagctgaagaaggagcaggacaccagcgcccatctggagcggatgaagaagaacctggagcagacggtgaaggacctgcagcaccgtctggacgaggctgagcagctggcgctgaagggcggcaagaagcagatccagaaactggaggccagggtccgtgaacttgaaggagaagttgaaaacgaacagaagcgcaatgttgaagctatcaagggtctgcgcaaacatgagagaagagtgaaagaactcacttaccaaactgaggaagaccgcaagaacgttctcaggctccaggaccttgtggacaaactgcaatcaaaggtcaaagcatacaagagacaagccgaggaagcggaggaacaatccaacgtcaacctggccaagttccgcaagatccagcacgagctggaggaagccgaggagcgggctgacatcgccgagtcccaggtcaacaagctgcgggtgaagagccgcgaggttcacaccaaaatcataagcgaagagtgatcgatccaaagcaggaaagtgaccaaagagatgagcaaaatgtgaagatctttgtcactccattttgtacttacgactttgggagataaaaaatttatctgccaaaaaaaaaaaaaaaaaaaaaaaaaaaaaaaaaaaaaaaaaaaaaaaaaaaaaaaaaaaaaaaaaaaaaaaaaaaaaaaaaaaaaaaaaaaaaaaaaaaaaaaaaaaaaaaaaaaaaaaaaaaactcgagggggggcccggt

SEQ ID NO: 13551 - protein, 892 aa, Rattus norvegicus
  ref <308>: DATABASE ACCESSION NUMBER: SWISS-Prot / AAB29713
  ref <309>: DATABASE ENTRY DATE: 2002-10-01
PPGCRNSARGKLEGDLKLAQESTMDVENDKQQLDEKLKKKEFEMSNLQSKIEDEQALGMQLQKKIKELQARIEELEEEIEAERASRAKAEKQRSDLSRELEEISERLEEAGGATSAQIEMNKKREAEFQKMRRDLEEATLQHEATAATLRKKHADSVAELGEQIDNLQRVKQKLEKEKSEMKMEIDDLASNMEVISKSKGNLEKMCRTLEDQVSELKTKEEEQQRLINELTAQRGRLQTESGEYSRQLDEKDSLVSQLSRGKQAFTQQIEELKRQLEEEVKAKSALAHALQSSRHDCDLLREQYEEEQEAKAELQRAMSKANSEVAQWRTKYETDAIQRTEELEEAKKKLAQRLQDAEEHVEAVNAKCASLEKTKQRLQNEVEDLMIDVERTNAACAALDKKQRNFDKILAEWKQKYEETHAELEASQKESRSLSTELFKIKNAYEESLDQLETLKRENKNLQQEISDLTEQIAEGGKRIHELEKIKKQIEQEKSELQAALEEAEASLEHEEGKILRIQLELNQVKSEIDRKIAEKDEEIDQLKRNHIRVVESMQSTLDAEIRSRNDAIRIKKKMEGDLNEMEIQLNHSNRMAAEALRNYRNTQGILKDTQLHLDDALRGQEDLKEQLAMVERRANLLQAEIEELRATLEQTERSRKIAEQELLDASERVQLLHTQNTSLINTKKKLETDISQIQGEMEDIVQEARNAEEKAKKAITDAAMMAEELKKEQDTSAHLERMKKNLEQTVKDLQHRLDEAEQLALKGGKKQIQKLEARVRELEGEVENEQKRNVEAIKGLRKHERRVKELTYQTEEDRKNVLRLQDLVDKLQSKVKAYKRQAEEAEEQSNVNLAKFRKIQHELEEAEERADIAESQVNKLRVKSREVHTKIISEE

SEQ ID NO: 13552 - DNA, 5925 bp, Homo sapiens; identical to SEQ ID NO: 12719

SEQ ID NO: 13553 - protein, 1939 aa, Homo sapiens; identical to SEQ ID NO: 12720

SEQ ID NO: 13554 - DNA, 2924 bp, Rattus norvegicus; identical to SEQ ID NO: 13550
  ref <308>: DATABASE ACCESSION NUMBER: EMBL / S68736
  ref <309>: DATABASE ENTRY DATE: 2000-06-10

SEQ ID NO: 13555 - protein, 892 aa, Rattus norvegicus; identical to SEQ ID NO: 13551
  ref <308>: DATABASE ACCESSION NUMBER: SWISS-Prot / AAB29713
  ref <309>: DATABASE ENTRY DATE: 2002-10-01

SEQ ID NO: 13556 - DNA, 5925 bp, Homo sapiens; identical to SEQ ID NO: 12719

SEQ ID NO: 13557 - protein, 1939 aa, Homo sapiens; identical to SEQ ID NO: 12720

SEQ ID NO: 13558 - DNA, 3762 bp, Rattus norvegicus
  ref <308>: DATABASE ACCESSION NUMBER: EMBL / S68944
  ref <309>: DATABASE ENTRY DATE: 2000-03-04
gaattccacttctcagccttgcttgtttctcttaccaaggtgtttttcaggtcctcctggccttttcatgacataatttcattgatttcaatgatatacaatatttctttaagcttattttactattatggcatttttgactccagtttttaatttttttctggagctaagaactgaacacagggtcttgcacttgctaggccagcactttaccatgagctcgaaccctaacccctatatggcatctgagagtaaccatctccttcatcttcacagccaaagcttgtacggaccaaggcctggagcagcttcttaaatgtcgctatctatggatggcaatgttctcttcacatatgtgcctgttcagaatttcagatttagaaaaagaatgccaaatatttcacactcacttacatgtaggtatctagaaaacattcagagactttggaaaccaactgtccagcctcatgttgagcaagcatgatgtatataataaagaatttgggctggagagatggctcagcagttaagagcacccaactgctcttccagaggtcaagagttcaattcccagcaaccacatggtggcttacaaccatctgtaaagagatccgatgccctcttctggtgtatctgaagacagctacagtatacggagctgcggcgccggcgcacgcgggacaggcttttggatgagagaaagctgacaggagctgagccccaccttctctgtgtgctggggaatagggctacgcagccccagtggcacccatgccgaagaacagcaaggtgacccagcgtgaacacagcaatgagcatgtcactgagtcggtggctgacctgctggccctcgaggagcctgtggactataagcagagtgtactgaacgtggctggtgagacaggtggcaagcagaaggtggcggaggaggagctggacgcagaggaccggccagcctggaacagcaagctgcagtacatcctggcccagatcggcttttctgtgggccttggcaacatctggaggttcccctacctgtgccagaaaaatggaggaggtgcctacctggtgccctacctggtgctgctgatcattattggcatccccctcttctttctggagctggctgtgggccagaggatccgccgtggcagcattggggtctggcactatgtgtgcccccgcctggggggcattggcttttccagctgtattgtctgcctcttcgttgggctgtactacaacgtgatcattggatggagcgtcttctacttcttcaagtctttccagtacccactgccctggagtgaatgtcctgtcatcaggaatgggactgtggcagtggtggagcctgagtgcgagaagagctcagctactacctacttctggtatcgagaggccttggacatctccaactccatctcagagagtgggggcctcaactggaagatgacagtctgcctccttgtggcctggagcatcgtgggcatggctgtagtcaagggcatccagtcctctggaaaggtaatgtatttcagctccctcttcccctgtgtggtgttggcctgcttcctggtccggggactgctgcttcgaggggcagttgatggcatcctgcacatgttcactcctaagctggacaagatgctggacccccaggtgtggcgggaggcagccacgcaggtcttcttcgccctggggctgggctttggaggtgtcatcgccttttccagctacaacaaacaggacaataactgccacttcgatgctgccttggtgtccttcatcaacttcttcacctccgtgttggccaccctcgtggtgtttgcagtgctgggtttcaaagctaacatcatgaatgagaagtgtgtggtcgagaatgctgagaaaattctagggtacctcaactccaatgtcttgagccgggacctcatcccaccccacgtcaacttctctcacctgaccaccaaggactactcagagatgtacaatgtcatcatgactgttaaggagaagcagttctcagccctgggcctggatccttgcctcctggaggatgagctggacaagtctgtgcagggcacaggcctggccttcatcgccttcactgaggccatgacacatttcccggcctctccgttctggtcggtcatgttcttcctgatgctcatcaacctgggcctgggcagtatgattgggaccatggcaggaatcaccacacctatcatcgacaccttcaaggtgcccaaggagatgttcacagtgagctgctgtgtctttgcattcttcgtggggctattgttcgtccagcgctccggaaactactttgtcaccatgtttgatgactattcggccaccctgccactcaccgtcatcgtcatccttgagaacatcgctgtggcctggatttacggaaccaagaagtttatgcaggagctgacagagatgctgggcttccgaccgtaccgattctatttctacatgtggaagtttgtgtctccactgtgcatggctgtcctcaccacagccagcatcatccagctgggggtgtcacccccaggctacagtgcctggattaaggaggaggccgccgagcgctacttgtacttccccaattgggccatggcactgctgatcaccctcattgctgtggcaaccctgcctatccctgtggtgttcatcctgaggcacttccacctgctctctgatggttccaacaccctctccgtgtcctacaagaagggccgcatgatgaaggacatctccaacctggaggagaacgatgagacacgcttcatcctcagcaaggtgcccagtgaggcaccctcccccatgcccacccaccgctcctatctggggcctggcagcacatcacccttggagagcagcagtcaccccaatggacgatacgggagcggctacctcttggccagcacccctgagtcagagctgtgaccacagctccaccctgcctgcctcccctcaatacccacctgcccacttggccgggcctgttctcttcctccatggtgccaccagacccaggccagtccaaggattgaggatctgtcctgccttgttccccacccaagtcccggcagacttcctacctatgagcaggggactggggacagttcagtccctattccaggcccccaacccatgtaactttttgagaactcttgccaagttgcagccatgtaaccacaacaatcccagtatggggggacttcaagtgggcactttaggtgtcacctcctcttctccctgtaaaacctatcacttgctgttcttgggtttcagggagggtccatttgtgccactggtcaatgtggtggtggacagaggcttcagggctgagggtgcaggaggtggacgttagcccagcccatcataagaacagggctcattgtcctgtctaacccagccaggctgctcgtgagctaagatagggatagggacgcgtgggtcaggactcgggctttgctttggcaggaggtatatgggatctcctcaattctgtcctatgagaagcagagccctctcaggcttaagcatgaacgctggcattaaagaaatgaatccagttggctcatggagtctttgaatgttcctgtttaccccaacaggggcaaagaggggtatattcttgatcctgcccgagagcatagtgatggggctgtttctatgcctttgtgggcttcgatgtcattgcccctccagtgaggaggccaaaaacccacggtggccgtgcccaggcgg

SEQ ID NO: 13559 - protein, 727 aa, Rattus norvegicus
  ref <308>: DATABASE ACCESSION NUMBER: SWISS-Prot / AAC60673
  ref <309>: DATABASE ENTRY DATE: 2001-10-16
MPKNSKVTQREHSNEHVTESVADLLALEEPVDYKQSVLNVAGETGGKQKVAEEELDAEDRPAWNSKLQYILAQIGFSVGLGNIWRFPYLCQKNGGGAYLVPYLVLLIIIGIPLFFLELAVGQRIRRGSIGVWHYVCPRLGGIGFSSCIVCLFVGLYYNVIIGWSVFYFFKSFQYPLPWSECPVIRNGTVAVVEPECEKSSATTYFWYREALDISNSISESGGLNWKMTVCLLVAWSIVGMAVVKGIQSSGKVMYFSSLFPYVVLACFLVRGLLLRGAVDGILHMFTPKLDKMLDPQVWREAATQVFFALGLGFGGVIAFSSYNKQDNNCHFDAALVSFINFFTSVLATLVVFAVLGFKANIMNEKCVVENAEKILGYLNSNVLSRDLIPPHVNFSHLTTKDYSEMYNVIMTVKEKQFSALGLDPCLLEDELDKSVQGTGLAFIAFTEAMTHFPASPFWSVMFFLMLINLGLGSMIGTMAGITTPIIDTFKVPKEMFTVGCCVFAFFVGLLFVQRSGNYFVTMFDDYSATLPLTVIVILENIAVAWIYGTKKFMQELTEMLGFRPYRFYFYMWKFVSPLCMAVLTTASIIQLGVSPPGYSAWIKEEAAERYLYFPNWAMALLITLIAVATLPIPVVFILRHFHLLSDGSNTLSVSYKKGRMMKDISNLEENDETRFILSKVPSEAPSPMPTHRSYLGPGSTSPLESSSHPNGRYGSGYLLASTPESEL

SEQ ID NO: 13560 - DNA, 3762 bp, Rattus norvegicus; identical to SEQ ID NO: 13558
  ref <308>: DATABASE ACCESSION NUMBER: EMBL / S68944
  ref <309>: DATABASE ENTRY DATE: 2000-03-04

SEQ ID NO: 13561 - protein, 727 aa, Rattus norvegicus; identical to SEQ ID NO: 13559
  ref <308>: DATABASE ACCESSION NUMBER: SWISS-Prot / AAC60673
  ref <309>: DATABASE ENTRY DATE: 2001-10-16

SEQ ID NO: 13562 - DNA, 1239 bp, Rattus norvegicus
  ref <308>: DATABASE ACCESSION NUMBER: EMBL / S69160
  ref <309>: DATABASE ENTRY DATE: 2000-06-23
atggagaatgaaaccgtcagtgaactgaaccaaaccgagctcccgccgcaagtagccgtggccctcgagtaccaggtggtcaccatcttacttgtggtggttatctgtggactgggcattgtgggcaacatcatggtagtcctggtggtcatgagaacgaagcacatgagaacccctacaaactgctacctggtgagtctggctgtggcggatctcatggtcctggtggctgcaggactccccaacatcaccgacagcatctatggttcctgggtctatggctatgttggctgcctctgcatcacgtatctccagtacctcggaattaacgcatcttcatgctcaataacagcctttaccattgagaggtacatagcaatctgccaccccatcaaagcccagtttctgtgcacattttccagagccaaaaaaatcataatctttgtctgggcctttacatccatttactgtatgctgtggttcttccttctggatctcaatatcagcacctacaaagatgctattgtgatatcctgtggctacaagatctcccgcaactactactcacctatttacctaatggactttggcgtcttttatgtcatgccaatgatcctggccactgtgctttacgggtttatagctagaatcctcttcttaaaccccactccttcagaccctaaagaaaactctaagacgtggaaaaatgactcaacccatcagaacaagaatatgaatttaaacaccaccaacagatgtttcaacagcaccgtttcttccaggaagcaggtcaccaagatgcttgcagtggttgtaattctgtttgcccttttatggatgccctacaggactcttgtggttgtcaactcatttctctccagccctttccaggaaaattggttcttgctcttttgcagaatttgcatttatctcaacagtgccatcaacccggtgatttacaccctcatgtctcagaagtttcgtgcagccttcaggaagctctgcaattgcaagcagaagcccactgagaaagctgctaactacagtgtggccctaaattacagtgtcatcaaggagtcagaccgctttagcacagagctagatgacatcaccgtcactgacacgtacgtgtcaaccacaaaagtatcatttgatgacacctgcttggcctccgagaagaatggacccagttcttgtacatatggatattctttgactgccaaacaggagaaaatatga

SEQ ID NO: 13563 - protein, 412 aa, Rattus norvegicus
  ref <308>: DATABASE ACCESSION NUMBER: SWISS-Prot / AAB29945
  ref <309>: DATABASE ENTRY DATE: 2001-10-16
MENETVSELNQTELPPQVAVALEYQVVTILLVVVICGLGIVGNIMVVLVVMRTKHMRTATNCYLVSLAVADLMVLVAAGLPNITDSIYGSWVYGYVGCLCITYLQYLGINASSCSITAFTIERYIAICHPIKAQFLCTFSRAKKIIIFVWAFTSIYCMLWFFLLDLNISTYKDAIVISCGYKISRNYYSPIYLMDFGVFYVMPMILATVLYGFIARILFLNPIPSDPKENSKTWKNDSTHQNKNMNLNTTNRCFNSTVSSRKQVTKMLAVVVILFALLWMPYRTLVVVNSFLSSPFQENWFLLFCRICIYLNSAINPVIYNLMSQKFRAAFRKLCNCKQKPTEKAANYSVALNYSVIKESDRFSTELDDITVTDTYVSTTKVSFDDTCLASEKNGPSSCTYGYSLTAKQEKI

SEQ ID NO: 13564 - DNA, 1348 bp, Homo sapiens
  ref <308>: DATABASE ACCESSION NUMBER: Refseq / NM_003301
  ref <309>: DATABASE ENTRY DATE: 2002-11-05
tagcttcaagccactgaagatggaaaacgagacagtcagtgaactgaaccaaacacagcttcagccacgagcagtggtggccttagaataccaggtggtcaccatcttacttgtactcattatttgtggcctgggcattgtaggcaacatcatggtagtcctggttgtcatgagaaccaagcacatgaggacccccacaaactgctacctggtgagcctggcagtagctgatctcatggtcttggtggccgcaggcctccccaacataacagacagtatctacggttcctgggtctatggctatgttggatgcctctgcattacttacctccagtatttgggaattaatgcatcctcttgttcaataacagcctttaccattgagaggtacatagcaatctgtcaccccatcaaagcccagtttctctgcacattttccagagccaaaaagattatcatctttgtctgggctttcacatctctttactgtatgctctggttcttcttgctggatctcaatattagcacctacaaagatgctattgtgatatcctgtggctacaagatctccaggaattactactcacctatttacctaatggactttggtgtcttttatgttgtgccaatgatcctggctaccgtcctctatggattcatagctagaatccttttcttaaatcccattccttcagatcctaaagaaaactctaagacatggaaaaatgattcaacccatcagaacacaaatctgaatgtaaatacctctaatagatgtttcaacagcacagtatcttcaaggaagcaggtcaccaagatgctggcagtggttgtaattctgtttgcccttttatggatgccctacaggactctagtggttgtcaactcatttctctccagtcctttccaagaaaattggtttttgctcttttgcagaatttgcatttatctcaacagtgccatcaacccggtgatttacaatctcatgtcccagaaattccgtgcagccttcagaaagctctgcaactgcaagcagaagccaacagagaaacctgctaactacagtgtggccctaaattacagcgtcatcaaggagtcagaccatttcagcacagagcttgatgatatcactgtcactgacacttacctgtctgccacaaaagtgtcttttgatgacacctgcttggcttctgaggtatcctttagccaaagttgattcatgaattagaagaaaatggatgacaaagaaattgagaatctgtgcagtcatcaacaaaagggagaacatggccaatagtcatatgtgaagacagagcagatcagtctttgtcaatgctctaacaaaccg

SEQ ID NO: 13565 - protein, 398 aa, Homo sapiens
  ref <308>: DATABASE ACCESSION NUMBER: Refseq / NP_003292
  ref <309>: DATABASE ENTRY DATE: 2002-11-05
MENETVSELNQTQLQPRAVVALEYQVVTILLVLIICGLGIVGNIMVVLVVMRTKHMRTPTNCYLVSLAVADLMVLVAAGLPNITDSIYGSWVYGYVGCLCITYLQYLGINASSCSITAFTIERYIAICHPIKAQFLCTFSRAKKIIIFVWAFTSLYCMLWFFLLDLNISTYKDAIVISCGYKISRNYYSPIYLMDFGVFYVVPMILATVLYGFIARILFLNPIPSDPKENSKTWKNDSTHQNTNLNVNTSNRCFNSTVSSRKQVTKMLAVVVILFALLWMPYRTLVVVNSFLSSPFQENWFLLFCRICIYLNSAINPVIYNLMSQKFRAAFRKLCNCKQKPTEKPANYSVALNYSVIKESDHFSTELDDITVTDTYLSATKVSFDDTCLASEVSFSQS

SEQ ID NO: 13566 - DNA, 2216 bp, Rattus norvegicus
  ref <308>: DATABASE ACCESSION NUMBER: EMBL / S69383
  ref <309>: DATABASE ENTRY DATE: 2000-03-04
tgcaagatgggtgtctaccgcatccgcgtctccaccggagactccaagtacgcgggctccaacaacgaggtctacctgtggttggttggacagcatggagaggcatctctcgggaagctgctacgaccctgtcgggactcggaagcagaattcaaagtggatgtgtcaggataccttgggccactgctgttcgtaagagtgcagaaatggcattatctcacggatgacgcctggttctgcaactggatttctgtgaagggccccggagaccaaggatcagagtacatgttcccctgttaccgatgggttcagggcagaagcatcctgagcctccctgagggcactggctgcaccgtggttgaagattctcaaggactgttcaggaaacatagggaagaggagcttgaagagaggaggagtctgtacaggtggggcaactggaaggatggctcaatcctgaatgtggcggcggccagtatatctgacctccctgtagaccaacgatttcgagaggacaaaagaattgaatttgaagcttcacaggttataggggtaatggatactgttgtcaactttcctataaacactgtgacctgctggaaaagcctagatgacttcaactgcgttttcaagagtggccataccaaaatggctgagcgggttcgaaactcctggaaggaagatgcgttctttgggtaccaattcctcaatggtgctaaccccatggtgctgaagcgctctacttgtcttcctgcccgcctggtattccctccaggaatggagaagctacaggcccagctgaacaaggagctccagaaaggcactctgtttgaagcggatttcttccttctggatgggatcaaggccaatgtcatcctttgtagccagcagtacctggctgcccctctcgtcatgctgaagctgatgcctgatggacaactcttgcccatagccatccagcttgaacttcccaaaactgggtctactccaccacctattttcacgccctcggatcccccaatggactggctcctagccaaatgctgggtccggagctccgacttacagctccatgagctgcaggctcatcttctgaggggacacttgatggctgaggtctttgctgtggccaccatgaggtgcctgccttccgtgcaccctgtttttaagcttctagttcctcatctgctttacaccatggaaattaatgtccgggccaggagtgacctgatctcagagagaggcttttttgacaaggcaatgagcacaggtgggggaggccacctggatcttctcaagcaagctggagcctttctgacctattgctcattgtgtccccccgatgacttggctgagcgaggactcttggatatcgagacttgcttctatgctaaagacgccctgcgactctggcagatcatgaatcggtacgtggtgggaatgttcaatctccactacaagaccgacaaagctgtgcaagacgactatgaactgcagagctggtgtcgagagatcactgacattggtcttcaaggggcccaggacagaggcttccctacctctcttcagtcccgggctcaggcttgctacttcatcaccatgtgcatcttcacgtgcaccgcacagcactcttccgtccatcttggccagctggattggttctactgggttcctaatgcaccctgcaccatgcggctgccaccacccaccaccaaggaagcaacaatggagaagctgatggctacactgcccaaccctaatcagtctactctccagataaatgtcgtttggctcctgggcagacgccaggctgttatggtgcccctgggccagcattcagaggaacactttccaaaccctgaggccaaggctgtgctgaagaagttcagagaggaactggctgccttggataaggaaattgagattcgtaataagagcttggacataccttatgagtacctgcggcccagcatggtggaaaacagcgtggccatatgagcatccccagactcctgctttgttgtttagttaagaccacccaagtacatccctgtgcttgagtggtggcagtcctgccctcccaagccccgccctctgaccctcaaagccccaccccctgcccatgtgggaccctcctccaagctgtccattgtctgctgcaatgaatacattttgctttggatgcattaaaaaaaaaaaaaaaaaaaaaaaaaaaa

SEQ ID NO: 13567 - protein, 662 aa, Rattus norvegicus
  ref <308>: DATABASE ACCESSION NUMBER: SWISS-Prot / AAB30132
  ref <309>: DATABASE ENTRY DATE: 2002-06-15
GVYRIRVSTGDSKYAGSNNEVYLWLVGQHGEASLGKLLRPCRDSEAEFKVDVSEYLGPLLFVRVQKWHYLTDDAWFCNWISVKGPGDQGSEYMFPCYRWVQGRSILSLPEGTGCTVVEDSQGLFRKHREEELEERRSLYRWGNWKDGSILNVAAASISDLPVDQRFREDKRIEFEASQVIGVMDTVVNFPINTVTCWKSLDDFNCVFKSGHTKMAERVRNSWKEDAFFGYQFLNGANPMVLKRSTCLPARLVFPPGMEKLQAQLNKELQKGTLFEADFFLLDGIKANVILCSQQYLAAPLVMLKLMPDGQLLPIAIQLELPKTGSTPPPIFTPSDPPMDWLLAKCWVRSSDLQLHELQAHLLRGHLMAELFAVATMRCLPSVHPVFKLLVPHLLYTMEINVRARSDLISERGFFDKAMSTGGGGHLDLLKQAGAFLTYCSLCPPDDLAERGLLDIETCFYAKDALRLWQIMNRYVVGMFNLHYKTDKAVQDDYELQSWCREITDIGLQGAQDRGFPTSLQSRAQACYFITMCIFTCTAQHSSVHLGQLDWFYWVPNAPCTMRLPPPTTKEATMEKLMATLPNPNQSTLQINVVWLLGRRQAVMVPLGQHSEEHFPNPEAKAVLKKFREELAALDKEIEIRNKSLDIPYEYLRPSMVENSVAI

SEQ ID NO: 13568 - DNA, 2671 bp, Homo sapiens
  ref <308>: DATABASE ACCESSION NUMBER: Refseq / NM_001140
  ref <309>: DATABASE ENTRY DATE: 2002-11-05
aagatgggtctctaccgcatccgcgtgtccactggggcctcgctctatgccggttccaacaaccaggtgcagctgtggctggtcggccagcacggggaggcggcgctcgggaagcgactgtggcccgcacggggcaaggagacagaactcaaggtggaagtaccggagtatctggggccgctgctgtttgtgaaactgcgcaaacggcacctccttaaggacgacgcctggttctgcaactggatctctgtgcagggccccggagccggggacgaggtcaggttcccttgttaccgctgggtggagggcaacggcgtcctgagcctgcctgaaggcaccggccgcactgtgggcgaggaccctcagggcctgttccagaaacaccgggaagaagagctggaagagagaaggaagttgtaccggtggggaaactggaaggacgggttaattctgaatatggctggggccaaactatatgacctccctgtggatgagcgatttctggaagacaagagagttgactttgaggtttcgctggccaaggggctggccgacctcgctatcaaagactctctaaatgttctgacttgctggaaggatctagatgacttcaaccggattttctggtgtggtcagagcaagctggctgagcgcgtgcgggactcctggaaggaagatgccttatttgggtaccagtttcttaatggcgccaaccccgtggtgctgaggcgctctgctcaccttcctgctcgcctagtgttccctccaggcatggaggaactgcaggcccagctggagaaggagctggagggaggcacactgttcgaagctgacttctccctgctggatgggatcaaggccaacgtcattctctgtagccagcagcacctggctgcccctctagtcatgctgaaattgcagcctgatgggaaactcttgcccatggtcatccagctccagctgccccgcacaggatccccaccacctccccttttcttgcctacggatcccccaatggcctggcttctggccaaatgctgggtgcgcagctctgacttccagctccatgagctgcagtctcatcttctgaggggacacttgatggctgaggtcattgttgtggccaccatgaggtgcctgccgtcgatacatcctatcttcaagcttataattccccacctgcgatacaccctggaaattaacgtccgggccaggactgggctggtctctgacatgggaattttcgaccagataatgagcactggtgggggaggccacgtgcagctgctcaagcaagctggagccttcctaacctacagctccttctgtccccctgatgacttggccgaccgggggctcctgggagtgaagtcttccttctatgcccaagatgcgctgcggctctgggaaatcatctatcggtatgtggaaggaatcgtgagtctccactataagacagacgtggctgtgaaagacgacccagagctgcagacctggtgtcgagagatcactgaaatcgggctgcaaggggcccaggaccgagggtttcctgtctctttacaggctcgggaccaggtttgccactttgtcaccatgtgtatcttcacctgcaccggccaacacgcctctgtgcacctgggccagctggactggtactcttgggtgcctaatgcaccctgcacgatgcggctgcccccgccaaccaccaaggatgcaacgctggagacagtgatggcgacactgcccaacttccaccaggcttctctccagatgtccatcacttggcagctgggcagacgccagcccgttatggtggctgtgggccagcatgaggaggagtatttttcgggccctgagcctaaggctgtgctgaagaagttcagggaggagctggctgccctggataaggaaattgagatccggaatgcaaagctggacatgccctacgagtacctgcggcccagcgtggtggaaaacagtgtggccatctaagcgtcgccaccctttggttatttcagcccccatcacccaagccacaagctgaccccttcgtggttatagccctgccctcccaagtcccaccctcttcccatgtcccaccctccctagaggggcaccttttcatggtctctgcacccagtgaacacattttactctagaggcatcacctgggaccttactcctctttccttccttcctcctttcctatcttccttcctctctctcttcctctttcttcattcagatctatatggcaaatagccacaattatataaatcatttcaagactagaatagggggatataatacatattactccacaccttttatgaatcaaatatgatttttttgttgttgttaagacagagtctcactttgacacccaggctggagtgcagtggtgccatcaccacggctcactgcagcctcagcgtcctgggctcaaatgatcctcccacctcagcctcctgagtagctgggactacaggctcatgccatcatgcccagctaatatttttttattttcgtggagacggggcctcactatgttgcctaggctggaaataggattttgaacccaaattgagtttaacaataataaaaagttgttttacgctaaagatggaaaagaactaggactgaactattttaaataaaatattggcaaaag

SEQ ID NO: 13569 - protein, 662 aa, Homo sapiens
  ref <308>: DATABASE ACCESSION NUMBER: Refseq / NP_001131
  ref <309>: DATABASE ENTRY DATE: 2002-11-05
MGLYRIRVSTGASLYAGSNNQVQLWLVGQHGEAALGKRLWPARGKETELKVEVPEYLGPLLFVKLRKRHLLKDDAWFCNWISVQGPGAGDEVRFPCYRWVEGNGVLSLPEGTGRTVGEDPQGLFQKHREEELEERRKLYRWGNWKDGLILNMAGAKLYDLPVDERFLEDKRVDFEVSLAKGLADLAIKDSLNVLTCWKDLDDFNRIFWCGQSKLAERVRDSWKEDALFGYQFLNGANPVVLRRSAHLPARLVFPPGMEELQAQLEKELEGGTLFEADFSLLDGIKANVILCSQQHLAAPLVMLKLQPDGKLLPMVIQLQLPRTGSPPPPLFLPTDPPMAWLLAKCWVRSSDFQLHELQSHLLRGHLMAEVIVVATMRCLPSIHPIFKLIIPHLRYTLEINVRARTGLVSDMGIFDQIMSTGGGGHVQLLKQAGAFLTYSSFCPPDDLADRGLLGVKSSFYAQDALRLWEIIYRYVEGIVSLHYKTDVAVKDDPELQTWCREITEIGLQGAQDRGFPVSLQARDQVCHFVTMCIFTCTGQHASVHLGQLDWYSWVPNAPCTMRLPPPTTKDATLETVMATLPNFHQASLQMSITWQLGRRQPVMVAVGQHEEEYFSGPEPKAVLKKFREELAALDKEIEIRNAKLDMPYEYLRPSVVENSVAI

SEQ ID NO: 13570 - DNA, 695 bp, Rattus norvegicus; identical to SEQ ID NO: 7722
  ref <308>: DATABASE ACCESSION NUMBER: EMBL / S73007
  ref <309>: DATABASE ENTRY DATE: 2000-03-04

SEQ ID NO: 13571 - protein, 140 aa, Rattus norvegicus; identical to SEQ ID NO: 433
  ref <308>: DATABASE ACCESSION NUMBER: SWISS-Prot / AAB20688
  ref <309>: DATABASE ENTRY DATE: 2001-10-16

SEQ ID NO: 13572 - DNA, 1543 bp, Homo sapiens; identical to SEQ ID NO: 7724
  ref <308>: DATABASE ACCESSION NUMBER: Refseq / NM_000345
  ref <309>: DATABASE ENTRY DATE: 2002-11-05

SEQ ID NO: 13573 - protein, 140 aa, Homo sapiens; identical to SEQ ID NO: 435
  ref <308>: DATABASE ACCESSION NUMBER: Refseq / NP_000336
  ref <309>: DATABASE ENTRY DATE: 2002-11-05

SEQ ID NO: 13574 - DNA, 2090 bp, Rattus norvegicus
  ref <308>: DATABASE ACCESSION NUMBER: EMBL / S75280
  ref <309>: DATABASE ENTRY DATE: 2000-06-24
ccgtctgtggggtgtttgttcttgccctcgtagccctctgtccagccgccatgataagcgccagcagagccgcggccgcgcgtctcgtgggcaccacagcgtcccggagtcccgccgccgcccgtcaccaggatggctggaatggccttagtcatgaggtttttagatttgtttcaagaagggattatgcgtcagaagcaatcaagggtgcagttgttggaattgatttgggtactactaactcctgtgtggctgttatggagggcaaacaagccaaggtcctggagaactccgaaggtgccagaactaccccttctgtggttgcctttacaccagatggggagcgacttgttggtatgccagcaaaacgacaagctgtcaccaacccaaacaatactttctatgctacaaagcgtcttattggacgacgatatgatgaccctgaagtacagaaagacactaagaatgttccctttaaaattgtccgtgcctccaatggtgatgcctgggtggaggctcatggaaaactctattctccgagtcagattggagcgtttgtgttgatgaagatgaaagagactgcagaaaattacttgggccatacagcaaaaaatgctgtgatcacagtccctgcttatttcaatgactcacagcgacaggccactaaggatgctggccagatatctgggctaaatgtgctccgagtgatcaacgagcctacagctgcagctctggcttacggtctggacaaatccgaagacaaagtcattgctgtatatgatttaggtggaggaacctttgacatttctatcctggaaattcagaaaggagtgtttgaggtgaaatccaccaatggggacactttcttaggaggtgaagactttgaccaagctttgttacggcacattgtcaaggagttcaagagggagacaggggttgatttgaccaaagacaacatggcacttcagagggttcgggaagctgctgagaaggctaaatgtgagctctcctcatctgtacagactgacatcaacttgccataccttacaatggatgcttctggaccaaagcatttgaatatgaagttgactcgagctcagtttgaaggcattgtcacagatctaatcaagagaactattgctccgtgtcagaaagctatgcaggatcgagaagtcagcaagagtgacataggagaagtgatcctggttggtggcatgacgaggatgcccaaggttcagcagactgtgcaagatctttttggcagagccccaagtaaagctgttaatcctgatgaggctgtagccattggagctgccattcaaggaggtgtgttggctggtgatgttacagatgtgctactcttggatgtcactcccctctctctaggtattgagacacttggaggtgtctttaccaagcttattaataggaacaccactattccaaccaaaaagagccaggtattttctactgctgctgatggacaaactcaagtagagattaaagtgtgtcagggggaaagagagatggccggagacaacaaacttctaggacagttcactttgattggaattcccccagcccctcgtggagtgcctcagattgaagttacatttgacattgatgccaatgggattgtgcacgtttctgccaaagataaagggacaggacgtgagcaacagattgtaatccagtcttctggtggattaagcaaagatgatattgaaaacatggttaaaaatgcagagaagtacgctgaagaagaccggaggaagaaggaacgtgttgaagcagttaatatggctgaaggaattgttcatgacacagaaaccaagatggaagaattcaaggaccagttgcctgctgacgagtgcaacaagctaaaggaagagatttccaaaatgagagaactccttgctcgaaaggacagtgaaacaggagaaaacattaggcaggcggcatcttcccttcagcaggcatcattgaaactctttgaaatggcatataaaaagatggcatctgaacgggaaggttctggaagttctagcactggggaacagaaggaagatcaaaaggaagagaagcagtag

SEQ ID NO: 13575 - protein, 679 aa, Rattus norvegicus; identical to SEQ ID NO: 7806
  ref <308>: DATABASE ACCESSION NUMBER: SWISS-Prot / AAB33049
  ref <309>: DATABASE ENTRY DATE: 2001-10-16

SEQ ID NO: 13576 - DNA, 1134 bp, Rattus norvegicus; identical to SEQ ID NO: 7758
  ref <308>: DATABASE ACCESSION NUMBER: EMBL / S75997
  ref <309>: DATABASE ENTRY DATE: 2000-03-04

SEQ ID NO: 13577 - protein, 215 aa, Rattus norvegicus; identical to SEQ ID NO: 7759
  ref <308>: DATABASE ACCESSION NUMBER: SWISS-Prot / AAB33384
  ref <309>: DATABASE ENTRY DATE: 2002-10-01

SEQ ID NO: 13578 - DNA, 3200 bp, Homo sapiens; identical to SEQ ID NO: 7760
  ref <308>: DATABASE ACCESSION NUMBER: Refseq / NM_016553
  ref <309>: DATABASE ENTRY DATE: 2002-11-05

SEQ ID NO: 13579 - protein, 522 aa, Homo sapiens [sequence omitted]

SEQ ID NO: 13580 - DNA, 421 bp, Rattus norvegicus
  misc_feature (1)..(421): n=a, c, g or t
  ref <308>: DATABASE ACCESSION NUMBER: EMBL / S76799
  ref <309>: DATABASE ENTRY DATE: 2000-03-03
aatcgaagctcaaccgaagagctaaataatgtctngaccccagtgcctggcgctggctgagctctgggtgcccgccgctgccgccgcgccggggggcacccgctggctggctgtcggcacgtgtccccattgcgcccggactccccggcttggagaaggaaacgcctggggcggcgcgccacctccgcctggcaggctttgatgagaccgggttccctcagctcgccaccgctgctttggggcagacgagaaagcgcacggggcccagggcagggcgcagggaccaggagcgtgacaacaatgtgactccactgccggggatccgagagctttgtgtggaccctgagttccaccaggtgagaagggtgatgaccatccttttccttactatggttatttcatacttcggttgcatgaaggc

SEQ ID NO: 13581 - protein, 249 aa, Rattus norvegicus; identical to SEQ ID NO: 6656
  ref <308>: DATABASE ACCESSION NUMBER: Refseq / NP_036645
  ref <309>: DATABASE ENTRY DATE: 2002-04-24

SEQ ID NO: 13582 - DNA, 1336 bp, Homo sapiens
  ref <308>: DATABASE ACCESSION NUMBER: Refseq / XM_006027
  ref <309>: DATABASE ENTRY DATE: 2002-08-01
gctgccgccgccgcgcccgggcgcacccgcccgctcgctgtcccgcgcaccccgtagcgcctcgggctcccgggccggacagaggagccagcccggtgcgcccctccacctcctgctcggggggctttaatgagacacccaccgctgctgtggggccggcggggagcagcaccgcgacggggaccggggctgggcgctggagccagaatcggaaccacgatgtgactccgccgccggggacccgtgaggtttgtgtggaccccgagttccaccaggtgagaagagtgatgaccatccttttccttactatggttatttcatactttggttgcatgaaggctgcccccatgaaagaagcaaacatccgaggacaaggtggcttggcctacccaggtgtgcggacccatgggactctggagagcgtgaatgggcccaaggcaggttcaagaggcttgacatcattggctgacactttcgaacacgtgatagaagagctgttggatgaggaccagaaagttcggcccaatgaagaaaacaataaggacgcagacttgtacacgtccagggtgatgctcagtagtcaagtgcctttggagcctcctcttctctttctgctggaggaatacaaaaattacctagatgctgcaaacatgtccatgagggtccggcgccactctgaccctgcccgccgaggggagctgagcgtgtgtgacagtattagtgagtgggtaacggcagcagacaaaaagactgcagtggacatgtcgggcgggacggtcacagtccttgaaaaggtccctgtatcaaaaggccaactgaagcaatacttctacgagaccaagtgcaatcccatgggttacacaaaagaaggctgcaggggcatagacaaaaggcattggaactcccagtgccgaactacccagtcgtacgtgcgggcccttaccatggatagcaaaaagagaattggctggcgattcataaggatagacacttcttgtgtatgtacattgaccattaaaaggggaagatagtggatttatgttgtatagattagattatattgagacaaaaattatctatttgtatatatacataacagggtaaattattcagttaagaaaaaaataattttatgaactgcatgtataaatgaagtttatacagtacagtggttctacaatctatttattggacatgtccatgaccagaagggaaacagtcatttgcgcacaacttaaaaagtctgcattacattccttgataatgttgtggtttgttgccgttgccaagaactgaaaacataaaaagttaaaaaaaataataaattgcatgctgc

SEQ ID NO: 13583 - protein, 247 aa, Homo sapiens; identical to SEQ ID NO: 6658
  ref <308>: DATABASE ACCESSION NUMBER: Refseq / XP_006027
  ref <309>: DATABASE ENTRY DATE: 2002-08-01

SEQ ID NO: 13584 - DNA, 1404 bp, Rattus norvegicus
  ref <308>: DATABASE ACCESSION NUMBER: EMBL / S78215
  ref <309>: DATABASE ENTRY DATE: 1995-09-27
aaggagagccaggccggaaggaggctgcaagagggcgggaggcaggagagggcccggagctggtgggccggagcggcggcgccgccatgtccgacagcgagaagctcaacctggattccatcatcgggcgcctgctggaagtgcagggctcacggcctggaaagaatgtgcagctgacagagaacgagatccgtggtctttgcctcaaatcccgggagattttcctgagccagcctattcttctggagcttgaggcgcctctcaagatctgtggtgacatccatggccagtactatgaccttctacggctgttcgagtatggtggcttccctccagagagcaactacctcttcttgggggactatgtggatcggggcaagcagtctttggagaccatctgcttgttgctggcctataagatcaaatacccggagaatttctttctactacgtgggaaccatgagtgtgccagcatcaaccgcatctatggcttctatgatgaatgcaagagacgatacaacatcaaactgtggaagactttcaccgactgcttcaactgcctgcccattgcagccattgtagatgagaagatcttctgctgccacggaggcctgtctccagacttgcaatccatggagcagattagacgtattatgcggcccacggacgtgcctgaccagggcctgttgtgtgatctgctgtggtctgaccctgacaaggatgttcaaggctggggcgagaatgaccgtggagtctcctttacctttggggccgaggttgtagccaagttcctgcacaagcatgatttggacctcatctgcagagcacatcaggttgtagaagatggctatgagttctttgccaagaggcagctggtgacactcttctcagcccccaactactgtggcgagtttgacaacgctggcgccatgatgagtgtggacgagacactcatgtgttccttccagatcctcaagcccgctgataagaataaggggaagtatgggcagttcagtggcctgaaccccggaggccgtcccatcactccaccccgcaattctgccaaagccaagaaatagcctccatgtgctgccctctgccccagatgacggattatttgtacagaaatcatgctgccatgggtcacactggcctctcaggcccacccatcatggggaacacagcgttaagtgtctttcctttattttttaaagaatcaatagcagcatctaattccccagggctccctcccaccagcacctgtggtggctgcaagtggaatcctggggccaaggctgcagctcagggcaatggcagaccagattgtgggtctccagccttgcatggctggcagccagatcctggggcaacccatctggtctcttgaataaaggtcaaagctgg

SEQ ID NO: 13585 - protein, 330 aa, Rattus norvegicus
  ref <308>: DATABASE ACCESSION NUMBER: SWISS-Prot / AAB34333
  ref <309>: DATABASE ENTRY DATE: 2002-06-15
MSDSEKLNLDSIIGRLLEVQGSRPGKNVQLTENEIRGLCLKSREIFLSQPILLELEAPLKICGDIHGQYYDLLRLFEYGGFPPESNYLFLGDYVDRGKQSLETICLLLAYKIKYPENFFLLRGNHECASINRIYGFYDECKRRYNIKLWKTFTDCFNCLPIAAIVDEKIFCCHGGLSPDLQSMEQIRRIMRPTDVPDQGLLCDLLWSDPDKDVQGWGENDRGVSFTFGAEVVAKFLHKHDLDLICRAHQVVEDGYEFFAKRQLVTLFSAPNYCGEFDNAGAMMSVDETLMCSFQILKPADKNKGKYGQFSGLNPGGRPITPPRNSAKAKK

SEQ ID NO: 13586 - DNA, 1374 bp, Homo sapiens
  ref <308>: DATABASE ACCESSION NUMBER: Refseq / NM_002708
  ref <309>: DATABASE ENTRY DATE: 2000-10-31
gcaaggagctgctggctggacggcggcatgtccgacagcgagaagctcaacctggactcgatcatcgggcgcctgctggaagtgcagggctcgcggcctggcaagaatgtacagctgacagagaacgagatccgcggtctgtgcctgaaatcccgggagatttttctgagccagcccattcttctggagctggaggcacccctcaagatctgcggtgacatacacggccagtactacgaccttctgcgactatttgagtatggcggtttccctcccgagagcaactacctctttctgggggactatgtggacaggggcaagcagtccttggagaccatctgcctgctgctggcctataagatcaagtaccccgagaacttcttcctgctccgtgggaaccacgagtgtgccagcatcaaccgcatctatggtttctacgatgagtgcaagagacgctacaacatcaaactgtggaaaaccttcactgactgcttcaactgcctgcccatcgcggccatagtggacgaaaagatcttctgctgccacggaggcctgtccccggacctgcagtctatggagcagattcggcggatcatgcggcccacagatgtgcctgaccagggcctgctgtgtgacctgctgtggtctgaccctgacaaggacgtgcagggctggggcgagaacgaccgtggcgtctcttttacctttggagccgaggtggtggccaagttcctccacaagcacgacttggacctcatctgccgagcacaccaggtggtagaagacggctacgagttctttgccaagcggcagctggtgacacttttctcagctcccaactactgtggcgagtttgacaatgctggcgccatgatgagtgtggacgagaccctcatgtgctctttccagatcctcaagcccgccgacaagaacaaggggaagtacgggcagttcagtggcctgaaccctggaggccgacccatcaccccaccccgcaattccgccaaagccaagaaatagcccccgcacaccaccctgtgccccagatgatggattgattgtacagaaatcatgctgccatgctgggggggggtcaccccgacccctaaggcccacctgtcacggggaacatggagccttggtgtatttttcttttctttttttaatgaatcaatagcagcgtccagtcccccagggctgcttcctgcctgcacctgcggtactgtgagcaggatcctggggccgaggctgcagctcagggcaacggcaggccaggtcgtgggtctccagccgtgcttggcctcaggctggcagcccggatcctggggcaacccatctggtctcttgaataaaggtcaaagctggatcggaatc

SEQ ID NO: 13587 - protein, 330 aa, Homo sapiens; identical to SEQ ID NO: 13585
  ref <308>: DATABASE ACCESSION NUMBER: Refseq / NP_002699
  ref <309>: DATABASE ENTRY DATE: 2000-10-31

SEQ ID NO: 13588 - DNA, 458 bp, Rattus norvegicus
  ref <308>: DATABASE ACCESSION NUMBER: EMBL / S79676
  ref <309>: DATABASE ENTRY DATE: 2000-03-04
tgcccagagcacaagacttctgacagtaccttccttgtattcatgtctcatggtctccaggagggaatatgtgggatcacatactctaatgaagttggagatattttagaggttgacacactctttcatatgatgaacacattgaagtgcccaagcttgaaagacaagcccaaggttatcattattcaggcatgccgtggagagaaacaaggagtggtgttgttaaaagattcagtagggaactccgaagagggattcttaacagatgcaatttttgaagatgatggcattaagaaggcccatatagagaaagattttattgctttctgctcttcaacaccagataatgtgtcctggagacatcccgtccagggatctctcttcattgagtcactcatcaaacacatgaaagaatatgcctggtcttgtgacttggaggacattttcagaaaggttcg

SEQ ID NO: 13589 - protein, 402 aa, Rattus norvegicus
  ref <308>: DATABASE ACCESSION NUMBER: SWISS-Prot / AAB35431
  ref <309>: DATABASE ENTRY DATE: 2002-06-15
MADKVLRAKRKQFINSVSVGTINGLLDELLEKRVLNQEEMDTIKLANITVMEKARDLCDHVTKKGPRASQMFITYICNEDCYLAEILELQSGPSAETVFVTEDSKGGHPFSSETKEKLNKEGGAFPGPSGSLKFCPLEIAQKLWKENHSEIYPIMKTPTRTRLALIICNTDFQHLSRRVGADVDLREMKLLLQDLGYTVKVKENLTALEMTKELKEFAACPEHKTSDSTFLVFMSHGLQEGICGITYSNEVADILKVDTIFQMMNTLKCPSLKDKPKVIIIQACRGEKQGVVLLKDSVGNSEEGFLTDAIFEDDGIKKAHIEKDFIAFCSSTPDNVSWRHPVRGSLFIESLIKHMKEYAWSCDLEDIFRKVRFSFEQPDSRLQMPTTERVTLTKRFYLFPGH

SEQ ID NO: 13590 - DNA, 671 bp, Rattus norvegicus
  ref <308>: DATABASE ACCESSION NUMBER: EMBL / S80127
  ref <309>: DATABASE ENTRY DATE: 2000-03-03
agtccagttcatcagctgtctggcttactccagcttaatacagggtcactcctgaaggatcctctctgagagtcattgtatgtgaagatgatgtctgcaagcaccatggctaaggtgatgatcctcatgctggcagtttgtctccttacccaggcagatgggaaacccgttaagaagagagctgtcagtgaaatacagcttatgcacaacctgggcaaacacctggcctctgtggagaggatgcaatggctgagaaaaaagctgcaagatgtacacaattttgttagtcttggagtccaaatggctgccagagaaggcagttaccagaggcccaccaagaaggaggaaaatgtccttgttgatggcaattcaaaaagtcttggcgagggggacaaagctgatgtggatgtattagttaaggctaaatctcagtaaatgctgacgtattctagaccgtgctgagcaataacatatgctgctatcctttcaagctccacgaagatcaccagtgctaattcttctactgtaataaaagtttgaaatttgattccacttttgctctttaaggtctcttccaatgattccatttcaatatattcttctttttaaagtattacacatttccacttctctccttaaatataaataaagtttaatgatcatgaaccaaa

SEQ ID NO: 13591 - protein, 115 aa, Rattus norvegicus
  ref <308>: DATABASE ACCESSION NUMBER: Refseq / NP_058740
  ref <309>: DATABASE ENTRY DATE: 2002-11-05
MMSASTMAKVMILMLAVCLLTQADGKPVKKRAVSEIQLMHNLGKHLASVERMQWLRKKLQDVHNFVSLGVQMAAREGSYQRPTKKEENVLVDGNSKSLGEGDKADVDVLVKAKSQ

SEQ ID NO: 13592 - DNA, 772 bp, Homo sapiens
  ref <308>: DATABASE ACCESSION NUMBER: Refseq / NM_000315
  ref <309>: DATABASE ENTRY DATE: 2000-10-31
tgtctttagtttactcagcatcagctactaacatacctgaacgaagatcttgttctaagacattgtatgtgaagatgatacctgcaaaagacatggctaaagttatgattgtcatgttggcaatttgttttcttacaaaatcggatgggaaatctgttaagaagagatctgtgagtgaaatacagcttatgcataacctgggaaaacatctgaactcgatggagagagtagaatggctgcgtaagaagctgcaggatgtgcacaattttgttgcccttggagctcctctagctcccagagatgctggttcccagaggccccgaaaaaaggaagacaatgtcttggttgagagccatgaaaaaagtcttggagaggcagacaaagctgatgtgaatgtattaactaaagctaaatcccagtgaaaatgaaaacagatattgtcagagttctgctctagacagtgtagggcaacaatacatgctgctaattcaaagctctattaagatttccaagtgccaatatttctgatataacaaactacatgtaatccatcactagccatgataactgcaattttaattgattattctgattccacttttattcatttgagttattttaattatcttttctattgtttattctttttaaagtatgttattgcataatttataaaagaataaaattcgacttttaaacctctcttctaccttaaaatgtaaaacaaaaatgtaatgatcataagtctaaataaatgaagtatttctcactc

SEQ ID NO: 13593 - protein, 115 aa, Homo sapiens
  ref <308>: DATABASE ACCESSION NUMBER: Refseq / NP_000306
  ref <309>: DATABASE ENTRY DATE: 2000-10-31
MIPAKDMAKVMIVMLAICFLTKSDGKSVKKRSVSEIQLMHNLGKHLNSMERVEWLRKKLQDVHNFVALGAPLAPRDAGSQRPRKKEDNVLVESHEKSLGEADKADVNVLTKAKSQ

SEQ ID NO: 13594 - DNA, 624 bp, Rattus norvegicus
  ref <308>: DATABASE ACCESSION NUMBER: EMBL / S82627
  ref <309>: DATABASE ENTRY DATE: 2000-03-04
atggaggctcaaggctctagccatgatatcagccgcttactctgcctgggagtcaaggaagactcggaagaacagcatgatgtgaaagcagaggctttctttcaggctggagaggggagagacgagaaaggtgcacagggtcagcctggagagggagcagtgggaacagaaggcgaaggagaagaattaaatggaggagaaggccactttggtcctggtgttccaggtcctgtgggtgagggggacaaggatggtggcaccagagctagtggcatggaggaggagcaacatgagcccgttgccgagggcactgagagtgtcaagtctgaggataagcagatgccactccgccgccctgggtccacccagcggcggctggcggaattggagcgcattttgctaagcagtggttcctccagtggcccaacatgggaggagcttgatagatggatggatatcagtgtgtccagagtgcagaattggtttaagattaggagggctgcatacagaagaaataggaggcggagaacaccaatccctgaacattttagagcaacatctgggtgccctgcttgtcttggagcaagatggggagtaagatgtccttttgcaacaccgagattt

SEQ ID NO: 13595 - protein, 208 aa, Rattus norvegicus
  ref <308>: DATABASE ACCESSION NUMBER: SWISS-Prot / AAC05016
  ref <309>: DATABASE ENTRY DATE: 2002-10-01
MEAQGSSHDISRLLCLGVKEDSEEQHDVKAEAFFQAGEGRDEKGAQGQPGEGAVGTEGEGEELNGGEGHFGPGVPGPVGEGDKDGGTRASGMEEEQHEPVAEGTESVKSEDKQMPLRRPGSTQRRLAELERILLSSGSSSGPTWEELDRWMDISVSRVQNWFKIRRAAYRRNRRRRTPIPEHFRATSGCPACLGARWGVRCPFATPRF

SEQ ID NO: 13596 - DNA, 897 bp, Rattus norvegicus
  ref <308>: DATABASE ACCESSION NUMBER: EMBL / S83436
  ref <309>: DATABASE ENTRY DATE: 2000-03-04
gcggcttcacgttcgcttctctctccactacagtatggggccggcgccgcgcgtcctggaactgttctacgatgtgctgtccccctactcctggctgggctttgaggtcctatgcagataccaacacctctggaatatcaagctgaagttgcggcccgctttactcgctgggatcatgaaagacagtggaaaccaaccaccagctatggttccccacaaaggccagtacatactcaaagagattcctctcctgaagcagctcttccaggttcccatgagcgtccccaaggatttctttggtgaacatgttaagaaaggaactgtaaatgccatgcgcttcctcaccgcggtgagcatggagcaaccagagatgctggagaaggtgtccagagagctgtggatgcgcatttggtcccgagatgaagatatcacggagtcccagaacattttgtctgcagcagagaaggccggaatggccacagcgcaagcccaacaccttctgaataagatctccaccgaactggtgaagagcaagctcagggagaccactggggcagcctgcaaatatggggcctttgggctgcccaccactgttgcccacgtggatggtaaaacctacatgctatttgggtctgaccgcatggagttgctagcttacctgctaggagagaagtggatgggccctgtgcccccaaccctgaatgccagactttaagattgccttagaaagtaaactttgacatctccatctgatgaagctgtcttctgtggccctgggggttgaaacaagagtccacctttagctgtggctgcctttacgtctgtgcctcccaagtgcctcttgaaaaaccttaagctctgcattcccataaataaacccgatgccactagacaaca

SEQ ID NO: 13597 - protein, 225 aa, Rattus norvegicus
  ref <308>: DATABASE ACCESSION NUMBER: SWISS-Prot / AAB50831
  ref <309>: DATABASE ENTRY DATE: 2001-10-16
GPAPRVLELFYDVLSPYSWLGFEVLCRYQHLWNIKLKLRPALLAGIMKDSGNQPPAMVPHKGQYILKEIPLLKQLFQVPMSVPKDFFGEHVKKGTVNAMRFLTAVSMEQPEMLEKVSRELWMRIWSRDEDITESQNILSAAEKAGMATAQAQHLLNKISTELVKSKLRETTGAACKYGAFGLPTTVAHVDGKTYMLFGSDRMELLAYLLGEKWMGPVPPTLNARL

SEQ ID NO: 13598 - DNA, 1017 bp, Homo sapiens
  ref <308>: DATABASE ACCESSION NUMBER: Refseq / NM_015917
  ref <309>: DATABASE ENTRY DATE: 2002-05-14
gaaaaggagctcctgctgccactgctcttccggagcctgcagcatggggcccctgccgcgcaccgtggagctcttctatgacgtgctgtccccctactcctggctgggcttcgagatcctgtgccggtatcagaatatctggaacatcaacctgcagttgcggcccagcctcataacagggatcatgaaagacagtggaaacaagcctccaggtctgcttccccgcaaaggactatacatggcaaatgacttaaagctcctgagacaccatctccagattcccatccacttccccaaggatttcttgtctgtgatgcttgaaaaaggaagtttgtctgccatgcgtttcctcaccgccgtgaacttggagcatccagagatgctggagaaagcgtcccgggagctgtggatgcgcgtctggtcaaggaatgaagacatcaccgagccgcagagcatcctggcggctgcagagaaggctggtatgtctgcagaacaagcccagggacttctggaaaagatcgcaacgccaaaggtgaagaaccagctcaaggagaccactgaggcagcctgcagatacggagcctttgggttgcccatcaccgtggcccatgtggatggccaaacccacatgttatttggctctgaccggatggagctgctggcgcacctgctgggagagaagtggatgggccctatacctccagccgtgaatgccagactttaagattgcccggaggaagcaaactcttcgtataaaaaaagcaggccatctgcttaacccttggctccaccataaggcactgggactcggatttctctatctgatagaggtattttctgtggccctgggagctgtctgtctttcccctacccccaaggatgccaggaagacgtccaccattagccatgtggcaacctttacttctatgcctcacaagtgcctttcagagagccccaattctgctttcccacaaaataaacctaatgccatcaggcaaaaaaaaaaaaaaaaaaaaa

SEQ ID NO: 13599 - protein, 226 aa, Homo sapiens
  ref <308>: DATABASE ACCESSION NUMBER: Refseq / NP_057001
  ref <309>: DATABASE ENTRY DATE: 2002-05-14
MGPLPRTVELFYDVLSPYSWLGFEILCRYQNIWNINLQLRPSLITGIMKDSGNKPPGLLPRKGLYMANDLKLLRHHLQIPIHFPKDFLSVMLEKGSLSAMRFLTAVNLEHPEMLEKASRELWMRVWSRNEDITEPQSILAAAEKAGMSAEQAQGLLEKIATPKVKNQLKETTEAACRYGAFGLPITVAHVDGQTHMLFGSDRMELLAHLLGEKWMGPIPPAVNARL

SEQ ID NO: 13600 - DNA, 2533 bp, Rattus norvegicus; identical to SEQ ID NO: 7927
  ref <308>: DATABASE ACCESSION NUMBER: EMBL / U01344
  ref <309>: DATABASE ENTRY DATE: 2000-03-04

SEQ ID NO: 13601 - protein, 290 aa, Rattus norvegicus; identical to SEQ ID NO: 7928
  ref <308>: DATABASE ACCESSION NUMBER: SWISS-Prot / P50297
  ref <309>: DATABASE ENTRY DATE: 2001-10-16

SEQ ID NO: 13602 - DNA, 1606 bp, Homo sapiens; identical to SEQ ID NO: 7929
  ref <308>: DATABASE ACCESSION NUMBER: EMBL / U80835
  ref <309>: DATABASE ENTRY DATE: 1999-07-05

SEQ ID NO: 13603 - protein, 291 aa, Homo sapiens; identical to SEQ ID NO: 7930
  misc_feature (1)..(291): Xaa=Unknown amino acid

SEQ ID NO: 13604 - DNA, 1803 bp, Rattus norvegicus
  ref <308>: DATABASE ACCESSION NUMBER: EMBL / U03763
  ref <309>: DATABASE ENTRY DATE: 2000-05-13
gggggctgagcaggatgttgactggctatcgttcattgagcactctcacgatcagcatcacgcacggaatccatccttcctgtgttgcagcttgtagaccctgatgcttgggctgccagcataaacgtggggatccagactctgtctaccgaggctgcccatagggacaggccctgggaagaggagctgagaccaggctaaaaagaacccaagaaatgaagcgcctcctcacgctggcttggttcctggcttgcagtgtgcctgcagtcccagggggcttgctagaactgaagtccatgattgagaaggtgactgggaagaatgccgtaaagaactatggcttctacggctgctactgtggctggggcggccacgggacccctaaggatggcactgattggtgctgtcggatgcacgaccgttgttatgggctactggaggagaaacactgtgccatccggacccagtcctatgactacagattcacacaggacttagtcatctgcgaacacgactccttctgtccagtgaggctttgtgcttgtgaccggaagctggtctactgcctgaggagaaacctctggagttacaaccgtctttaccagtattaccccaacttcctctgctaatgtcctctgtgggctctcgccgggagtgcctcccacagtggcggcccccctcggctgtattcctgatccgtccacccaaggtcttggatctgccttcctctgtgtaccactgggctggacagagcccagggttacaccctaccctccagaatcctagagagggactctgatgtagagtctgcggactctggatagctgagcctgcacttgcagaatttggcgctgggccccggagctccctcagctccaggccagtgtcgtgttgactttcctttcaatttctggaacccaactgccattaccaccctccagagacctcttactagaggagaagccaaattaactctataaatctgccatgtagctattaaataaaacccattcacgaggcgagaagaacaccaccccagcactccctctgacagggctggggtaggagtgccaatgcttctctaacccctgaggcatctgtgcaccctctaggatggaggtcaggaaacaggtgggggccttacatgcctttcatggtttgtcttgagtttattttcttaaaccttagggtctttcaagccagacctggagctcaagattcttctggaggaaggtgagacacagccctatgccaccttgacgctccaggctagaaagggacagcccctagccctggcttctgcaactgtgtggtcttgaacctccgtatagtccgaatccctctggctctcctcaaaatataaaacaagcctccttccaatagcatattggtgcacacccctaatcccatcacctgggaggaggaggcggcaggagcatcaggagttcaaggccagctcctgccccctagcagggatggtaggctgcatgagagtgtgtctcagaaagaaccacctggtgcgggtacagggatgctgggattctgagatgtcactcagtgcgggaaaagattcaaggaggggaacagatcaatggcagaatgactgtctgtgccgagttaagggcactgaaaatctcagctcatctatcgctttatagaagatagagctttgggaggaagcaaggcactctacagtaaaggagtggcctttccaaggaagggtctaggctccttcttctccagaacatgcacaggacataggagatccattatttagagacctttcgtgttcgaacgttttct

SEQ ID NO: 13605 - protein, 137 aa, Rattus norvegicus
  ref <308>: DATABASE ACCESSION NUMBER: SWISS-Prot / AAA82112
  ref <309>: DATABASE ENTRY DATE: 2002-06-15
MKRLLTLAWFLACSVPAVPGGLLELKSMIEKVTGKNAVKNYGFYGCYCGWGGHGTPKDGTDWCCRMHDRCYGLLEEKHCAIRTQSYDYRFTQDLVICEHDSFCPVRLCACDRKLVYCLRRNLWSYNRLYQYYPNFLC

SEQ ID NO: 13606 - DNA, 1016 bp, Homo sapiens
  ref <308>: DATABASE ACCESSION NUMBER: Refseq / NM_000929
  ref <309>: DATABASE ENTRY DATE: 2002-11-05
atggataccaatgttccgactggagacggggagcccgcgagacccgggtctccagggtctgcccaaggaagttgctcatgggagcagacccctagagcaggatttgaggccaggccaaagagaaccccagagatgaaaggcctcctcccactggcttggttcctggcttgtagtgtgcctgctgtgcaaggaggcttgctggacctaaaatcaatgatcgagaaggtgacagggaagaacgccctgacaaactacggcttctacggctgttactgcggctggggcggccgaggaacccccaaggatggcaccgattggtgctgttgggcgcatgaccactgctatgggcggctggaggagaagggctgcaacattcgcacacagtcctacaaatacagattcgcgtggggcgtggtcacctgcgagcccgggcccttctgccatgtgaacctctgtgcctgtgaccggaagctcgtctactgcctcaagagaaacctacggagctacaacccacagtaccaatactttcccaacatcctctgctcctaggcctccccagcgagctcctcccagaccaagacttttgttctgtttttctacaacacagagtactgactctgcctggttcctgagagaggctcctaagtcacagacctcagtctttctcgaagcttggcggacccccagggccacactgtaccctccagcgagtcccaggagagtgactctggtcataggacttggtagggtcccagggtccctaggcctccacttctgagggcagcccctctggtgccaagagctctcctccaactcagggttggctgtgtctcttttcttctctgaagacagcgtcctggctccagttggaacactttcctgagatgcacttacttctcagcttctgcgatcagattatcatcaccaccaccctccagagaattttacgcaagaagagccaaattgactctctaaatctggtgtatgggtattaaataaaattcattctcaaggct

SEQ ID NO: 13607 - protein, 138 aa, Homo sapiens
  ref <308>: DATABASE ACCESSION NUMBER: Refseq / NP_000920
  ref <309>: DATABASE ENTRY DATE: 2002-11-05
MKGLLPLAWFLACSVPAVQGGLLDLKSMIEKVTGKNALTNYGFYGCYCGWGGRGTPKDGTDWCCWAHDHCYGRLEEKGCNIRTQSYKYRFAWGVVTCEPGPFCHVNLCACDRKLVYCLKRNLRSYNPQYQYFPNILCS

SEQ ID NO: 13608 - DNA, 1803 bp, Rattus norvegicus; identical to SEQ ID NO: 13604
  ref <308>: DATABASE ACCESSION NUMBER: EMBL / U03763
  ref <309>: DATABASE ENTRY DATE: 2000-05-13

SEQ ID NO: 13609 - protein, 137 aa, Rattus norvegicus; identical to SEQ ID NO: 13605
  ref <308>: DATABASE ACCESSION NUMBER: SWISS-Prot / AAA82112
  ref <309>: DATABASE ENTRY DATE: 2002-06-15

SEQ ID NO: 13610 - DNA, 1016 bp, Homo sapiens; identical to SEQ ID NO: 13606
  ref <308>: DATABASE ACCESSION NUMBER: Refseq / NM_000929
  ref <309>: DATABASE ENTRY DATE: 2002-11-05

SEQ ID NO: 13611 - protein, 138 aa, Homo sapiens; identical to SEQ ID NO: 13607
  ref <308>: DATABASE ACCESSION NUMBER: Refseq / NP_000920
  ref <309>: DATABASE ENTRY DATE: 2002-11-05

SEQ ID NO: 13612 - DNA, 1803 bp, Rattus norvegicus; identical to SEQ ID NO: 13604
  ref <308>: DATABASE ACCESSION NUMBER: EMBL / U03763
  ref <309>: DATABASE ENTRY DATE: 2000-05-13

SEQ ID NO: 13613 - protein, 137 aa, Rattus norvegicus; identical to SEQ ID NO: 13605
  ref <308>: DATABASE ACCESSION NUMBER: SWISS-Prot / AAA82112
  ref <309>: DATABASE ENTRY DATE: 2002-06-15

SEQ ID NO: 13614 - DNA, 1016 bp, Homo sapiens; identical to SEQ ID NO: 13606
  ref <308>: DATABASE ACCESSION NUMBER: Refseq / NM_000929
  ref <309>: DATABASE ENTRY DATE: 2002-11-05

SEQ ID NO: 13615 - protein, 138 aa, Homo sapiens; identical to SEQ ID NO: 13607
  ref <308>: DATABASE ACCESSION NUMBER: Refseq / NP_000920
  ref <309>: DATABASE ENTRY DATE: 2002-11-05

SEQ ID NO: 13616 - DNA, 2122 bp, Rattus norvegicus
  ref <308>: DATABASE ACCESSION NUMBER: EMBL / U05989
  ref <309>: DATABASE ENTRY DATE: 2002-02-02
caggcggcggcggcgggagtcaggagtcgcggcgtgaggggcgcccccgccggcccctctgggaacatggcgaccggcggctatcggagcagcggcagcaccacggacttcctggaggagtggaaagcgaagcgcgagaagatgcgcgccaagcagaaccccgtgggcccgggttcgagcggcggggatccagccgccaagtcccctgcgggaccgctcgcccagactacggccgcggggacctcggaactcaaccacggccccgccggcgcggccgcacctgccgcccccgggccgggcgccctgaactgcgctcacggctcgtccgcgctgccccgcggggctcccggctcccggcggccggaggacgagtgtcctattgccgctggggccgcgggagcacccgcgtcccggggagacgaggaggagccggatagcgccccggagaagggccgcagctcggggcccagcgccaggaaaggcaaagggcagatcgagaagaggaagctgcgggagaagcgccgctccaccggcgtggtcaacatccccgcggcggagtgcttagatgagtacgaagatgacgaagcaggacagaaggaacggaagcgagaggatgctatcacacagcagaacaccatccagaatgaagctgcgagcctcccagatccaggaacctcctacctgccccaggacccgtcgagaacagtcccaggcagatacaaaagcacaatcagtgccccagaagaagaaatcttaaatagatatccccgaacagatagaagtggcttcagtagacacaacagagataccagtgcgcctgctaacttcgcttcaagtagcaccttggaaaagagaattgaagatcttgagaaggaagtcttgagagaaaggcaagaaaaccttcgacttacgaggctgatgcaagataaagaagaaatgattggaaaactcaaggaagagattgatttgttaaatagagacctcgatgacatggaagacgaaaacgagcaactaaagcaggaaaataaaactcttttgaaagttgttgggcagctgacaaggtagaagacgcaaggctgcctcggtgtgggaaacctgcttttaaaccgcggatgaatgtcatggcgaaggcgcccgtgattcagtgcgctgagagaactgtatatttatttctagaaaacacatggatctcttcttctcaaaatttactctttctcattactagtttttaaaaagtgtaaatccccgtctttcaacatagaagttaacatctttagctattaaaatgataggtgatgcctcttggttctgtgtgatactcagataatatatggttcgaagtagcagccatttgcatatgttttatctatgttagcacatattctccctaaaggaagatgcatagtctttgtttacatgaattcaaatccttgggggagttgcctacagatgccctattactaatgtgtgcgccttccgtgtgctaatgcctactcataaagacgcatctgccgtctcgtcctcccacgggctctcctgattccgagtggtaatagatacactactttgtatagcagtaatcgttcaaaggaaagctattttgcagttatttcatatgttctagttggctaaatataaacttaagaaaatacttgaactgtgttatagtaagtgaaaaattactattttgtgtttgaatattgaaaaaaaatttcagtaacttctgaaaaacagttaatgtatagtttcttatgtaggtactatcattcctttttttttattgctctagggtttactagtaaataatgggatatttaaaaagttgtttattcttcaggcctcaattgtgtacaatttcagtattgaagaagaaaattgatgctgtgaatagcatgtgcttcaaaaatcagaactaaaaaatttttccacacttaaaatatgtacacatacgtcagcatgtgtaagcagagataacacagatatctcagccgattcctgagttggagacaccctgggatgctttttgtcaatagagaatcatcccataaccctaacactgaagattttaaagcaaccatatttgaagatttataaaataaagttgtcttctattaaaaaaaaa

SEQ ID NO: 13617 - protein, 332 aa, Rattus norvegicus
  ref <308>: DATABASE ACCESSION NUMBER: SWISS-Prot / AAA16492
  ref <309>: DATABASE ENTRY DATE: 2001-12-01
MATGGYRSSGSTTDFLEEWKAKREKMRAKQNPVGPGSSGGDPAAKSPAGPLAQTTAAGTSELNHGPAGAAAPAAPGPGALNCAHGSSALPRGAPGSRRPEDECPIAAGAAGAPASRGDEEEPDSAPEKGRSSGPSARKGKGQIEKRKLREKRRSTGVVNIPAAECLDEYEDDEAGQKERKREDAITQQNTIQNEAASLPDPGTSYLPQDPSRTVPGRYKSTISAPEEEILNRYPRTDRSGFSRHNRDTSAPANFASSSTLEKRIEDLEKEVLRERQENLRLTRLMQDKEEMIGKLKEEIDLLNRDLDDMEDENEQLKQENKTLLKVVGQLTR

SEQ ID NO: 13618 - DNA, 1719 bp, Homo sapiens
  ref <308>: DATABASE ACCESSION NUMBER: EMBL / U63809
  ref <309>: DATABASE ENTRY DATE: 1998-07-02
ctttccgcgcggcggaagagcgcgcgccagcttcggcacacttgggagccggatcccagccctacgcctcgtcccctacaagctcctccaagccccgccggctgctgtgggagcggcggccgtcctctcctggaggtcgtctcctggcatcctcggggccgcaggaaggaagaggaggcagcggccggagccctggtgggcggcctgaggtgagagcccgaccggcccctttgggaatatggcgaccggtggctaccggaccagcagcggcctcggcggcagcaccacagacttcctggaggagtggaaggcgaaacgcgagaagatgcgcgccaagcagaaccccccgggcccggcccccccgggagggggcagcagcgacgccgctgggaagccccccgcgggggctctgggcaccccggcggccgccgctgccaacgagctcaacaacaacctcccgggcggcgcgccggccgcacctgccgtccccggtcccgggggcgtgaactgcgcggtcggctccgccatgctgacgcgggcgcccccggcccgcggcccgcggcggtcggaggacgagcccccagccgcctctgcctcggctgcaccgccgccccagcgtgacgaggaggagccggacggcgtcccagagaagggcaagagctcgggccccagtgccaggaaaggcaaggggcagatcgagaagaggaagctgcgggagaagcggcgctccaccggcgtggtcaacatccctgccgcagagtgcttagatgagtacgaagatgatgaagcagggcagaaagagcggaaacgagaagatgcaattacacaacagaacactattcagaatgaagctgtaaacttactagatccaggcagttcctatctgctacaggagccacctagaacagtttcaggcagatataaaagcacaaccagtgtctctgaagaagatgtctcaagtagatattctcgaacagatagaagtgggttccctagatataacagggatgcaaatgtttcaggtactctggtttcaagtagcacactggaaaagaaaattgaagatcttgaaaaggaagtagtaacagaaagacaagaaaacctaagacttgtgagactgatgcaagataaagaggaaatgattggaaaactcaaagaagaaattgatttattaaatagagacctagatgacatagaagatgaaaatgaacagctaaagcaggaaaataaaactcttttgaaagttgtgggtcagctgaccaggtagaggattcaagactcaatgtggaaaaaatattttaaactactgattgaatgttaatggtcaatgctagcacaatattcctatgctgcaatacattaaaataactaagcaagtatatttatttctagcaaacagatgtttgttttcaaaatacttctttttcattattggttttaaaaaagcattatccttttatctcacaaataagtaatatctttcagttattaaatgatagataatgcctttttggttttgtgtggtattcaactaatacatggtttaaagtcacagccgtttgaatatattttatcttggtagtacattttctcccttaggaatatacatagtctttgtttacatgagttccaatacttttgggatgttaccctcacatgtccctatactgatgtgtgccaccttttatgtgttgatgactcactcataaggttttggtc

SEQ ID NO: 13619 - protein, 342 aa, Homo sapiens
  ref <308>: DATABASE ACCESSION NUMBER: SWISS-Prot / AAC24947
  ref <309>: DATABASE ENTRY DATE: 2002-10-01
MATGGYRTSSGLGGSTTDFLEEWKAKREKMRAKQNPPGPAPPGGGSSDAAGKPPAGALGTPAAAAANELNNNLPGGAPAAPAVPGPGGVNCAVGSAMLTRAPPARGPRRSEDEPPAASASAAPPPQRDEEEPDGVPEKGKSSGPSARKGKGQIEKRKLREKRRSTGVVNIPAAECLDEYEDDEAGQKERKREDAITQQNTIQNEAVNLLDPGSSYLLQEPPRTVSGRYKSTTSVSEEDVSSRYSRTDRSGFPRYNRDANVSGTLVSSSTLEKKIEDLEKEVVTERQENLRLVRLMQDKEEMIGKLKEEIDLLNRDLDDIEDENEQLKQENKTLLKVVGQLTR

SEQ ID NO: 13620 - DNA, 2260 bp, Rattus norvegicus
  ref <308>: DATABASE ACCESSION NUMBER: EMBL / U07971
  ref <309>: DATABASE ENTRY DATE: 2000-03-04
gggcgactaggaccttgtgcacacagagcagcagcagaaaccggggcgatgctacgggtgcggtgtctgcgcggcggcagccgaggcgccgaggcggtgcactacatcggctctcggcttggaggatccttaacaggatgggtgcagcgaactttccagagcacccaggcagctacagcttcctcccaaaattcctgtgcagctgaagacaaggccacccaccccctgcccaaggactgccctgtctcctcttacaacgaatgggaccctttagaggaagtgatagtgggcagagctgaaaatgcctgtgtcccaccattcacagtggaggtgaaggccaatacatatgaaaagtactggccgttttaccagaaaaatggaggtctttattttcccaaagatcatctgaagaaggctgttgccgaggtcgaagagatgtgcaatattttatcaatggaaggcgtgaccgtgaagcggcctgaccccattgactggtcactgaagtataagactcctgattttgagtctacaggtttatacagcgcgatgcctcgagacatcctgatggttgtggggaatgagattatagaggctcccatggcatggcgctcacgcttctttgagtaccgcgcatacaggtcaattatcaaagactacttccaccgtggtgccaagtggacaacggcccccaagcccacaatggctgacgaactgtatgaccaggactatcccatccattctgtggaagacagacacaaattggccgctcaggggaagttcgtgacaaccgagttcgagccttgctttgatgctgctgacttcattcgagctggaagagatatttttgcgcagagaagccaggttacaaactacctgggcatcgagtggatgcgtaggcatcttgccccagactacagagtgcatatcatctcgtttaaagaccccaatccaatgcatattgatgccaccttcaacatcattggacctggtcttgtgctctccaaccctgaccgtccatgccatcagattgatcttttcaagaaagcaggatggaccatagttacccctccaacacctgtgatccccgatgatcatcccctctggatgtcatccaagtggctctccatgaacgtcttaatgctagatgagaagcgcgtgatggtagacgccaatgaggtcccaattcagaagatgtttgagaagctgggtatcagcaccattaaggttaacattcgaaatgccaattccctaggaggaggcttccactgctggacctgcgacgtccgccgccgaggcacccttcagtcctactttgactgagcggccgtggtgtggcttggggcatagcctcagatatacctaagaagcagcaaggcccttctctcgctttaataaatgcatgaactgtagtgctttgaacaatcacctccttaacagggttcccaaacctgggttactttttgttgacataaggaaggataacttttgataggtcttactttcttctcctaaagttatttacaatttggcttcaaatataaaagttgagtaaatgtataccagggcagaaattagtcatttgagtaacttggccgctaatatttaaccatctacctctgtttttaatcttctttcctaaaggcagcttgaaatgtcggtcctaaccttgtcttcttttcctctttggtggacttgtgaatgttcatattacttcaaagacttaggagaaaaacacagaccctaagtagaaccagatatttgtctatttttcaaaaataattggatgttttttaaaattttgtttttaaataacctagactatgcaaacactggaaaaaaaatgaagtaacttttccatgaatgcttttaacattcttgtgtcaccatttggtactaaactctagtcctgcctcttacctcatttcaagtgggttttcctcccttccttccttccttcctcccttccttctttccttcctttcttccaaaaacttagagaagtgcttggtttaatagagtgaaacttgtagatcctattcctaaaggttgatgatgttcagtatcaacaggtaaaatggcatctttgttaatctgtcttgtttacatatatgcaaattatttaaggcatagagttttaaagcattttttaaaaactaatgcaggtaaaagaaatacatgtgacatgaaataattttaatgttggatattgtatatgtatttttattctaataaagttttgtgttccagattggaaaaaaaa

SEQ ID NO: 13621 - protein, 423 aa, Rattus norvegicus
  ref <308>: DATABASE ACCESSION NUMBER: SWISS-Prot / AAA21250
  ref <309>: DATABASE ENTRY DATE: 2002-06-15
MLRVRCLRGGSRGAEAVHYIGSRLGGSLTGWVQRTFQSTQAATASSQNSCAAEDKATHPLPKDCPVSSYNEWDPLEEVIVGRAENACVPPFTVEVKANTYEKYWPFYQKNGGLYFPKDHLKKAVAEVEEMCNILSMEGVTVKRPDPIDWSLKYKTPDFESTGLYSAMPRDILMVVGNEIIEAPMAWRSRFFEYRAYRSIIKDYFHRGAKWTTAPKPTMADELYDQDYPIHSVEDRHKLAAQGKFVTTEFEPCFDAADFIRAGRDIFAQRSQVTNYLGIEWMRRHLAPDYRVHIISFKDPNPMHIDATFNIIGPGLVLSNPDRPCHQIDLFKKAGWTIVTPPTPVIPDDHPLWMSSKWLSMNVLMLDEKRVMVDANEVPIQKMFEKLGISTIKVNIRNANSLGGGFHCWTCDVRRRGTLQSYFD

SEQ ID NO: 13622 - DNA, 2330 bp, Homo sapiens
  ref <308>: DATABASE ACCESSION NUMBER: Refseq / NM_001482
  ref <309>: DATABASE ENTRY DATE: 2002-05-14
gaattcggcacgagcgacgcggcccagaggccaggaacattccgcgcgtggaccagccgggccagggcgatgctgcgggtgcggtgtctgcgcggcgggagccgcggcgccgaggcggtgcactacatcggatctcggcttggacgaaccttgacaggatgggtgcagcgaactttccagagcacccaggcagctacggcttcctcccggaactcctgtgcagctgacgacaaagccactgagcctctgcccaaggactgccctgtctcttcttacaacgaatgggaccccttagaggaagtgatagtgggcagagcagaaaacgcctgtgttccaccgttcaccatcgaggtgaaggccaacacatatgaaaagtactggccattttaccagaagcaaggagggcattattttcccaaagatcatttgaaaaaggctgttgctgaaattgaagaaatgtgcaatattttaaaaacggaaggagtgacagtaaggaggcctgaccccattgactggtcattgaagtataaaactcctgattttgagtctacgggtttatacagtgcaatgcctcgagacatcctgatagttgtgggcaatgagattatcgaggctcccatggcatggcgttcacgcttctttgagtaccgagcgtacaggtcaattatcaaagactacttccaccgtggcgccaagtggacaacagctcctaagcccacaatggctgatgagctttataaccaggattatcccatccactctgtagaagacagacacaaattggctgctcagggaaaatttgtgacaactgagtttgagccatgctttgatgctgctgacttcattcgagctggaagagatatttttgcacagagaagccaggttacaaactacctaggcattgaatggatgcgtaggcatcttgctccagactacagagtgcatatcatctcctttaaagatcccaatcccatgcatattgatgctaccttcaacatcattggacctggtattgtgctttccaaccctgaccgaccatgtcaccagattgatcttttcaagaaagcaggatggactatcattactcctccaacaccaatcatcccagacgatcatccactctggatgtcatccaaatggctttccatgaatgtcttaatgctagatgaaaaacgtgttatggtggatgccaatgaagttccaattcaaaagatgtttgaaaagctgggtatcactaccattaaagttaacattcgtaatgccaattccctgggaggaggcttccattgctggacctgcgatgtccggcgccgaggcaccctacagtcctacttggactgaacaggcctgatggagcttgtggctggcctcagatacacctaagaagcttaggggcaaggttcattctcctgctttaaaaagtgcatgaactgtagtgctttaaacaatcatctccttaacaggggtcgtaagcctggtttgcttctattacttttctttgacataaagaaaataacttctgctaggtattactctctactcctaaagttatttactatttggcttcaagtataaaattttggtgaatgtgtaccaagaaaaaattagtcacctgagtaacttggccactaataattaaccatctacctctgtttttaattttctttccaaaaggcagcttgaaatgttggtcctaatcttaattttttttcctcttctatagacttgagaatgtttttctctaaatgagagaaagacttagaatgtacacagatccaaaatagaatcagattatctctttttttctaaaggagagaaagacttagaacatacacagatcctaagtagaaccaggtaattgtctctttttctaataaggaatttgggtaatttttaattttttgttttttaaaaaataacctagactatgcaaaacatcaaagtgaattttccatgaatgtttttaatattctcatctcaacattgtgatatatgctactaaaaaccttttcatatacatcttacctcatttcaagtgaattattttaatctttttctctctttccaaaaatttacaggaatgtttagtgtaattggatttcgctatcagttcccatccttaagttttgatattcaatatctgatagatacactgcatctttggtcatctaagatttgtttacaaatgtgcaaattatttagagcatagactttataagcattaaaaaaaactaatggaggtaaaacctaaatgcgatgtgaaataattttagtgttgatactgtatgtgtatttttattctaataaacttttgtgttccagattgaaaa

SEQ ID NO: 13623 - protein, 423 aa, Homo sapiens
  ref <308>: DATABASE ACCESSION NUMBER: Refseq / NP_001473
  ref <309>: DATABASE ENTRY DATE: 2002-05-14
MLRVRCLRGGSRGAEAVHYIGSRLGRTLTGWVQRTFQSTQAATASSRNSCAADDKATEPLPKDCPVSSYNEWDPLEEVIVGRAENACVPPFTIEVKANTYEKYWPFYQKQGGHYFPKDHLKKAVAEIEEMCNILKTEGVTVRRPDPIDWSLKYKTPDFESTGLYSAMPRDILIVVGNEIIEAPMAWRSRFFEYRAYRSIIKDYFHRGAKWTTAPKPTMADELYNQDYPIHSVEDRHKLAAQGKFVTTEFEPCFDAADFIRAGRDIFAQRSQVTNYLGIEWMRRHLAPDYRVHIISFKDPNPMHIDATFNIIGPGIVLSNPDRPCHQIDLFKKAGWTIITPPTPIIPDDHPLWMSSKWLSMNVLMLDEKRVMVDANEVPIQKMFEKLGITTIKVNIRNANSLGGGFHCWTCDVRRRGTLQSYLD

SEQ ID NO: 13624 - DNA, 4957 bp, Rattus norvegicus
  ref <308>: DATABASE ACCESSION NUMBER: EMBL / U08260
  ref <309>: DATABASE ENTRY DATE: 2000-03-04
ccgctggttccggtcctggccccccagcaatttcctccaaagaacagggtcatgaaaagaggccgcccggcgggccccgcaggcgatgcgcggcgccggtggcccccgcggccctcggggccccgctaagatgctgctgctgctggcgctggcgtgcgtcagcccgttcccggaggaggtgccggggccgggcgcggtcggcgggggcacgggcggggcgcggcagctcaacgtggcgcttgtcttctccggcccggcatatgcggcagaggcggcgcgcttgggcccggccgtggcagcggcagtgcgcagccccggcctggacgtacggcccgtggcgctggtgctcaacggctccgaccctcgcagccttgtgctgcagctctgcgacctgctgtcggggctgcgcgtgcacggcgtggtgttcgaggacgactcccgcgcgcccgccgtcgcgcccattctcgacttcctgtccgcgcagacctcgctgcccatcgtagccgtgcacggcggcgccgcgctcgtgctcacacccaaggagaagggctccaccttcctgcagcttggctcctccacagagcaacagttgcaggtcatttttgaggtgctggaggagtacgactggacatcctttgtggcagtgaccacgcgtgccccaggccatcgggccttcttgtcatacatcgaggtgctgactgatggcagcctggtgggctgggagcatcgaggagcgctgacactggaccccggggcgggtgaggctgtactgggcgcacagctccgtagtgtcagtgcgcagatccgcctgctcttctgcgcccgcgaggaggcagagcctgttttccgggcagcggaagaggccggcctcactgggcctggctacgtctggttcatggtgggaccccagctggctggaggcgggggctccggggtccctggggagccccttcttctgccaggaggttccccactgcctgccgggctgtttgcagtgcgctctgctggctggcgtgacgacttggcacgtcgagtggctgctggtgtggcggtggtggccagaggtgcccaggccctgctgcgagactatggcttcctgcctgagctgggtcatgactgccgcacccagaatcgcacccaccgcggggagagtctgcacaggtacttcatgaacatcacctgggataaccgagactactccttcaatgaggatggctttctggtgaacccttcactggtggtcatctccctcaccagagacaggacatgggaagtggtgggcagctgggaacagcagaccctccgcctcaagtaccctctatggtcccgctatggccgcttcctgcagccagtggatgacacacagcacctcactgtggccacgctggaggagagaccctttgtcattgtagagcctgcagaccccatcagcggcacttgcatcagagactcggtcccctgccggagccagctcaaccgtacccacagccctccgcctgacgctccccgcccggagaagagatgctgcaagggtttctgcattgatattctgaagaggctggcgcacaccatcggtttcagctatgacctctacctggttaccaacggcaagcatggcaagaagatcgatggcgtctggaatggcatgattggtgaggtgttctatcagcgtgcggacatggccatcggctctctcaccatcaatgaggagcggtcagagatcgtggacttctccgtcccctttgtagagacaggcatcagcgtcatggtggcacgcagcaatggcactgtgtccccctctgccttcctcgagccctacagccctgctgtctgggtgatgatgttcgtcatgtgcctcaccgtggtcgccgtcacagttttcatctttgagtacctcagtcctgtgggctataaccgaagcctggccacgggcaaacgccctggtggctctaccttcaccattgggaaatccatctggctgctgtggggcctggtcttcaacaactccgtgccagtggagaatcctcggggcaccaccagcaagatcatggtgctggtgtgggccttcttcgcggtcatctttcttgccagctacacagccaatctggccgccttcatgatccaggaggagtacgtggacaccgtgtctgggctcagcgaccggaagttccagcgaccccaggagcaatacccacctctgaagtttggcacggtgcccaatgggtccacggaaaagaacatccggagcaactaccctgacatgcacagctacatggtgcgatacaaccagccgagagtggaggaggcactcacacagctcaaggcagggaaactggacgccttcatctatgacgcagcagtgctcaactacatggcccgcaaggatgagggctgcaagctggtcaccatcggctccggcaaggtcttcgccaccactggttatggcatcgccctacacaagggctcccgctggaagaggcccatcgacctggcgctgctgcagttcctgggggacgatgagattgagatgctggagcggctgtggctttcaggaatctgccacaatgacaaaatcgaagtgatgagtagcaagctggatatcgacaacatggcaggtgtcttctacatgctccttgtggccatgggcctctccttgctggtcttcgcctgggaacatctggtgtactggcgcctgcggcattgcctgggtcccacccaccgcatggatttcctactggccttctccaggggtatgtacagctgctgcagcgccgaggctgctccaccgccggccaagcctccgccaccgcctcagccgctgcccagtcccgcatatcccgccgctcgcccgccccctggccccgcacccttcgtgccccgagagcgcgcagctgccgaccgctggcgccgagccaagggcacagggcccccggggggcgcagcgatagccgacggcttccaccgatactacggccccatcgagccacaggggctgggcctcggcgacgcacgcgcggcaccgagaggcgcagccggacgcccactgtccccacccaccacacagcccccgcagaagccaccaccttcctacttcgccatcgtgcgcgagcaggagccgaccgagcccccggccggcgccttccccggcttcccatctccgcctgcgccgcccgctgcggctgccgctgccgtcgggccgccactgtgtcgcctggctttcgaggacgaaagcccgcccgcaccctcgcgctggccgcgttcagatcccgagagccagcctctgttgggtgggggcgcgggcggcccgagcgcgggggccccaaccgcaccaccgccgcgccgtgccgcgccaccaccgtgcgcctacctggacctcgagccttcgccttcggactccgaggactcggagagcctgggcggagcatcgctcggtggcctggagccctggtggttcgccgacttcccctacccgtatgccgagcgcctcgggccgccgcccggccgctactggtcggtcgacaagctcgggggctggcgcgctggtagctgggactacctgcccccgcgcggaggccccgcgtggcactgccgccactgcgccagcctggagctgctaccgccaccgcgccacctcagctgctcgcacgacggcttagacggcggctggtgggcgcctccgcctccaccctgggccgcggggccacctccccggcgccgggcgcgctgtggttgtccgcgacctcacccacaccgcccccgggcctcgcaccgtgcgcccgccgccgcgccgcaccaccaccgacacaggcgcgcggccggtggctgggacttcccgccgcccggccccacctcgcgttcgctggaggacctgagctcctgcaccacggcggcccccacgcgcaggctcaccgggccatcccgccacgcgcgccgctgcccgcacgctgcgcactgggggccgcccctgcccaccgcatcgcaccggagacaccggggcggggacctgggcacacgcaggggctctgcgcatttctccagcctggagtccgaggtatgacgcggctccggcccccacccccacccccgccgccccctcggtcagcgcaggccacggcccgagggggcgcgctaagtggacaggaccctcatgggttgggaaggacagaaacggacctggccggaccccgcctggagcagcgtcctgcgcccccacccccttcgccttgggggaactatgagccagaggggacttggtcgcccaaatctcacccatcctgagagcaagggggcggggttcttggagcccaccgactcttttttttttaaacccgaaaaggctttttaacgtcacctgattggcgggaggtgtgggggagtcacgccgcgcccccacccctacgtccgggccatggctcacatcgactgtgccagctcctagcccagacacactctcgggagcctgtttttaacctttcattcatcaggactcaaaactgtgagaccggtatgccaaactgtgactccagaccttggcccgccacacagaaacccctgaccccagactgtgacttccaacacctaaaatgatcatctgaccccagactgtgccccgaccagactgtgacccttcatgtcagacctcgatgaccccttcttttagatccttgttggctctgacctatgacctctcctccacgaaagtcctaccctcacctgtctcccccacttacctaccaccccagatgccatcaatcacatcttcaagtccagcccttatttgtgacccttcagtgatgatccagcagacactccacccccaggtctcctttcccagatttcagcagggtctgaggctgggctcaaaggagggtctgggagcccacacttgacctttccttccctctcccactcctacactgcagtgtttggaataaaaccatgtttttacacctcctca

SEQ ID NO: 13625 - protein, 1324 aa, Rattus norvegicus
  misc_feature (1)..(1324): Xaa=Unknown amino acid
MRGAGGPRGPRGPAKMLLLLALACVSPFPEEVPGPGAVGGGTGGARQLNVALVFSGPAYAAEAARLGPAVAAAVRSPGLDVRPVALVLNGSDPRSLVLQLCDLLSGLRVHGVVFEDDSRAPAVAPILDFLSAQTSLPIVAVHGGAALVLTPKEKGSTFLQLGSSTEQQLQVIFEVLEEYDWTSFVAVTTRAPGHRAFLSYIEVLTDGSLVGWEHRGALTLDPGAGEAVLGAQLRSVSAQIRLLFCAREEAEPVFRAAEEAGLTGPGYVWFMVGPQLAGGGGSGVPGEPLLLPGGSPLPAGLFAVRSAGWRDDLARRVAAGVAVVARGAQALLRDYGFLPELGHDCRTQNRTHRGESLHRYFMNITWDNRDYSFNEDGFLVNPSLVVISLTRDRTWEVVGSWEQQTLRLKYPLWSRYGRFLQPVDDTQHLTVATLEERPFVIVEPADPISGTCIRDSVPCRSQLNRTHSPPPDAPRPEKRCCKGFCIDILKRLAHTIGFSYDLYLVTNGKHGKKIDGVWNGMIGEVFYQRADMAIGSLTINEERSEIVDFSVPFVETGISVMVARSNGTVSPSAFLEPYSPAVWVMMFVMCLTVVAVTVFIFEYLSPVGYNRSLATGKRPGGSTFTIGKSIWLLWGLVFNNSVPVENPRGTTSKIMVLVWAFFAVIFLASYTANLAAFMIQEEYVDTVSGLSDRKFQRPQEQYPPLKFGTVPNGSTEKNIRSNYPDMHSYMVRYNQPRVEEALTQLKAGKLDAFIYDAAVLNYMARKDEGCKLVTIGSGKVFATTGYGIALHKGSRWKRPIDLALLQFLGDDEIEMLERLWLSGICHNDKIEVMSSKLDIDNMAGVFYMLLVAMGLSLLVFAWEHLVYWRLRHCLGPTHRMDFLLAFSRGMYSCCSAEAAPPPAKPPPPPQPLPSPAYPAARPPPGPAPFVPRERAAADRWRRAKGTGPPGGAAIADGFHRYYGPIEPQGLGLGDARAAPRGAAGRPLSPPTTQPPQKPPPSYFAIVREQEPTEPPAGAFPGFPSPPAPPAAAAAAVGPPLCRLAFEDESPPAPSRWPRSDPESQPLLGGGAGGPSAGAPTAPPPRRAAPPPCAYLDLEPSPSDSEDSESLGGASLGGLEPWWFADFPYPYAERLGPPPGRYWSVDKLGGWRAGSWDYLPPRGGPAWHCRHCASLELLPPPRHLSCSHDGLDGGWWAPPPPPWAAGPPPRRRARCGCPRPHPHRPRASHRAPAAAPHHHRHRRAAGGWDFPPPGPTSRSLEDLSSCTTAAPTRRLTGPSRHARRCPHAAHWGPPLPTASHRRHRGGDLGTRRGSAHFSSLESEVX

SEQ ID NO: 13626 - DNA, 3995 bp, Homo sapiens
  ref <308>: DATABASE ACCESSION NUMBER: EMBL / L76224
  ref <309>: DATABASE ENTRY DATE: 1999-07-02
atgggtggggccctggggccggccctgttgctcacctcgctcttcggtgcctgggcagggctgggtccggggcagggcgagcagggcatgacggtggccgtggtgtttagcagctcagggccgccccaggcccagttccgtgcccgcctcaccccccagagcttcctggacctacccctggagatccagccgctcacagttggggtcaacaccaccaaccccagcagcctcctcacccagatctgcggcctcctgggtgctgcccacgtccacggcattgtctttgaggacaacgtggacaccgaggcggtggcccagatccttgacttcatctcctcccagacccatgtgcccatcctcagcatcagcggaggctctgctgtggtcctcacccccaaggagccgggctccgccttcctgcagctgggcgtgtccctggagcagcagctgcaggtgctgttcaaggtgctggaagagtacgactggagcgccttcgccgtcatcaccagcctgcacccgggccacgcgctcttcctggagggcgtgcgcgccgtcgccgacgccagccacgtgagttggcggctgctggacgtggtcacgctggagctgggcccgggagggccgcgcgcgcgcacgcagcgcctgctgcgccagctcgacgcgcccgtgtttgtggcctactgctcgcgcgaggaggccgaggtgctcttcgccgaggcggcgcaggccggtctggtggggcccggccacgtgtggttggtgcccaacctggcgctgggcagcaccgatgcgccccccgccaccttccccgtgggcctcatcagcgtcgtcaccgagagctggcgcctcagcctgcgccagaaggtgcgcgacggcgtggccattctggccctgggcgcccacagctactggcgccagcatggaaccctgccagccccggccggggactgccgtgttcaccctgggcccgtcagccctgcccgggaggccttctacaggcacctactgaatgtcacctgggagggccgagacttctccttcagccctggtgggtacctggtccagcccaccatggtggtgatcgccctcaaccggcaccgcctctgggagatggtggggcgctgggagcatggcgtcctatacatgaagtaccccgtgtggcctcgctacagtgcctctctgcagcctgtggtggacagtcggcacctgacggtggccacgctggaagagcggccctttgtcatcgtggagagccctgaccctggcacaggaggctgtgtccccaacaccgtgccctgccgcaggcagagcaaccacaccttcagcagcggggacgtggccccctacaccaagctctgctgtaagggattctgcatcgacatcctcaagaagctggccagagtggtcaaattctcctacgacctgtacctggtgaccaacggcaagcatggcaagcgggtgcgcggcgtatggaacggcatgattggggaggtgtactacaagcgggcagacatggccatcggctccctcaccatcaatgaggaacgctccgagatcgtagacttctctgtaccctttgtggagacgggcatcagtgtgatggtggctcgcagcaatggcaccgtctccccctcggccttcttggagccatatagccctgcagtgtgggtgatgatgtttgtcatgtgcctcactgtggtggccatcaccgtcttcatgttcgagtacttcagccctgtcagctacaaccagaacctcaccagaggcaagaagtccgggggcccagctttcactatcggcaagtccgtgtggctgctgtgggcgctggtcttcaacaactcagtgcccatcgagaacccgcggggcaccaccagcaagatcatggttctggtctgggccttctttgctgtcatcttcctcgccagctacacggccaacctggccgccttcatgatccaagagcaatacatcgacactgtgtcgggcctcagtgacaagaagtttcagcggcctcaagatcagtacccacctttccgcttcggcacggtgcccaacggcagcacggagcggaacatccgcagtaactaccgtgacatgcacacccacatggtcaagttcaaccagcgctcggtggaggacgcgctcaccagcctcaagatggggaagctggatgccttcatctatgatgctgctgtcctcaactacatggcaggcaaggacgagggctgcaagctggtcaccattgggtctggcaaggtctttgctaccactggctacggcatcgccatgcagaaggactcccactggaagcgggccatagacctggcgctcttgcagttcctgggggacggagagacacagaaactggagacagtgtggctctcagggatctgccagaatgagaagaacgaggtgatgagcagcaagctggacatcgacaacatggcaggcgtcttctacatgctgctggtggccatggggctggccctgctggtcttcgcctgggagcacctggtctactggaagctgcgccactcggtgcccaactcatcccagctggacttcctgctggctttcagcaggggcatctacagctgcttcagcggggtgcagagcctcgccagcccaccgcggcaggccagcccggacctcacggccagctcggcccaggccagcgtgctcaagatgctgcaggcagcccgcgacatggtgaccacggcgggcgtaagcagctccctggaccgcgccactcgcaccatcgagaattggggtggcggccgccgtgcgcccccaccgtccccctgcccgaccccgcggtctggccccagcccatgcctgcccacccccgacccgcccccagagccgagccccacgggctggggaccgccagacgggggtcgcgcggcgcttgtgcgcagggctccgcagcccccgggccgccccccgacgccggggccgcccctgtccgacgtctcccgagtgtcgcgccgcccagcctgggaggcgcggtggccggtgcggaccgggcactgcgggaggcacctctcggcctccgagcggcccctgtcgcccgcgcgctgtcactacagctcctttcctcgagccgaccgatccggccgccccttcctcccgctcttcccggagctggaggacctgccgctgctcggtaaggagcagctggcccggcgggaggccctgctgcacgcggcctgggcccggggctcgcgcccgcgtcacgcttccctgcccagctccgtggccgaggccttcgctcggcccagctcgctgcccgctgggtgcaccggccccgcctgcgcccgccccgacggccactcggcctgcaggcgcttggcgcaggcgcagtcgatgtgcttgccgatctaccgggaggcctgccaggagggcgagcaggcaggggcccccgcctggcagcacagacagcacgtctgcctgcacgcccacgcccacctgccattttgctggggggctgtctgtcctcaccttccaccctgtgccagccacggctcctggctctccggggcctgggggcctctggggcacaggggcaggactctggggctgggcacaggctacagagacagtgggggactggacgagatcagcagggtagcccgtgggacgcaaggcttcccgggaccctgcacctggagacggatctccagtctggagtcagaagtgtgagttatcagccactcaggctccgagccagctggattctctgcctgccactgtcagggttaagcggcaggcaggattgggcttttctggcttctaccatgaaatcctggccatgggaccccagtgacagatgatgtcttccatggtcatcagtgacctcagtagcctcaaatcatggtgagggctgggcttttgctgtcctcttctcacgcaaagttctgccaggaaggtgtgctgtgggggtcaaactcctgaggctctcccttccctggggctaccaattactggtcatggct

SEQ ID NO: 13627 - protein, 1233 aa, Homo sapiens [sequence omitted]

SEQ ID NO: 13628 - DNA, 1727 bp, Rattus norvegicus
  ref <308>: DATABASE ACCESSION NUMBER: EMBL / U09361
  ref <309>: DATABASE ENTRY DATE: 2000-03-04
agaaaggcagacacaagagcaagcctgcacgtgtgaaggcatccacagaagaagtaccttctctggaaaatctcaccgtgactgaggccggctgggatggcctcagactcaactggactgcagatgacctggcctatgagtactttgttattcaggtacaggaagccaacaaggtggagactgctcacaacttcacagtacttggtaacctccggactgcagacatcccgggcctcaaggctgccactccttatagagtttccatttatggggtagctcggggctataaaacacccgtgctctctgctgagaccttcacagggaaaactcccagtttgggagaggtgactgtggctgaggtgggctgggatgccctcaagctcaactggactgctccagaaggagcctatacgaactttttcattcaggtgctagaggctgacatgacccagactgtccagaacctcacagtcccaggaggactcaggtcagtggacctacctgggctcaaagcagccacccgctattacatcaccgttcgaggggtcacccaggacttcagcacagcccctctctctgttgaggtcttgacagaggagatccctcaactgggaggcttgtccgtgactgaggtcagctgggacagccttacactcaactggaccacagatgatctggcctataagcactttatcattcaggtgcaggaggccaacaatgtagaggctgctcagaacctcacagtatctggtagcctcagagttgtggacatcccaggcctcaaggctgataccccttatagagtctccatctatggggtgatccagggctatagaacaccaatgctctctgctgatgtctccacagccaaagaacctgaaattggaaacttaaatatttctgatgtaactcctgagagcttcaatctctcctggacagctaccgacgggatcttcgacatgtttactatcgaaattattgattctaataggttgctgcagacagcagaacataatatatctggtgctgaacgaactgcccacatctcgggccttccacctagtactgatttcattgtctacctctctggaattgctcccagcatccgtaccaaaaccatcagtaccacagccaccacagaagctgaaccggaagttgacaaccttctagtttcagatgctactccagacggtttccgtctgtcctggactgctgatgaagggatattcgacagttttgttatcaggatcagagataccaaaaagcaatctgaaccacaagaaataaccctcccttcccccgaccgtaccagggacataacaggtctcagagaggccactgagtacgaaattgaactctatggaataagccgtggaaggcgatcccagccagtcagtgccatagcaacaacagccatgggctctccgaaggaaatcatgttctcagacatcactgaaaatgcagccacagtcagctggagggcaccgactgctcaagtggagaatttccggattacttatgtgcctgtaacaggaggtcccccatccatggtgaccgtggatgggacggatactgagacccgactggtgaggctcacccctggagtggagtaccacgtcagtgtgattgccatgaagggatttgaagaaagtgatccggtctcggggtctctaatcacagctctcgatggtccatctggccttctgacagccaacagcacggactca

SEQ ID NO: 13629 - protein, 575 aa, Rattus norvegicus
  ref <308>: DATABASE ACCESSION NUMBER: SWISS-Prot / AAA56909
  ref <309>: DATABASE ENTRY DATE: 2003-02-01
KGRHKSKPARVKASTEEVPSLENLTVTEAGWDGLRLNWTADDLAYEYFVIQVQEANKVETAHNFTVLGNLRTADIPGLKAATPYRVSIYGVARGYKTPVLSAETFTGKTPSLGEVTVAEVGWDALKLNWTAPEGAYTNFFIQVLEADMTQTVQNLTVPGGLRSVDLPGLKAATRYYITVRGVTQDFSTAPLSVEVLTEEIPQLGGLSVTEVSWDSLTLNWTTDDLAYKHFIIQVQEANNVEAAQNLTVSGSLRVVDIPGLKADTPYRVSIYGVIQGYRTPMLSADVSTAKEPEIGNLNISDVTPESFNLSWTATDGIFDMFTIEIIDSNRLLQTAEHNISGAERTAHISGLPPSTDFIVYLSGIAPSIRTKTISTTATTEAEPEVDNLLVSDATPDGFRLSWTADEGIFDSFVIRIRDTKKQSEPQEITLPSPDRTRDITGLREATEYEIELYGISRGRRSQPVSAIATTAMGSPKEIMFSDITENAATVSWRAPTAQVENFRITYVPVTGGPPSMVTVDGTDTETRLVRLTPGVEYHVSVIAMKGFEESDPVSGSLITALDGPSGLLTANSTDS

SEQ ID NO: 13630 - DNA, 7543 bp, Homo sapiens
accggccacagcctgcctactgtcacccgcctctcccgcgcgcagatacacgcccccgcctccgtgggcacaaaggcagcgctgctggggaactcgggggaacgcgcacgtgggaaccgccgcagctccacactccaggtacttcttccaaggacctaggtctctcgcccatcggaaagaaaataattctttcaagaagatcagggacaactgatttgaagtctactctgtgcttctaaatccccaattctgctgaaagtgagataccctagagccctagagccccagcagcacccagccaaacccacctccaccatgggggccatgactcagctgttggcaggtgtctttcttgctttccttgccctcgctaccgaaggtggggtcctcaagaaagtcatccggcacaagcgacagagtggggtgaacgccaccctgccagaagagaaccagccagtggtgtttaaccacgtttacaacatcaagctgccagtgggatcccagtgttcggtggatctggagtcagccagtggggagaaagacctggcaccgccttcagagcccagcgaaagctttcaggagcacacagtggatggggaaaaccagattgtcttcacacatcgcatcaacatcccccgccgggcctgtggctgtgccgcagcccctgatgttaaggagctgctgagcagactggaggagctggagaacctggtgtcttccctgagggagcaatgtactgcaggagcaggctgctgtctccagcctgccacaggccgcttggacaccaggcccttctgtagcggtcggggcaacttcagcactgaaggatgtggctgtgtctgcgaacctggctggaaaggccccaactgctctgagcccgaatgtccaggcaactgtcaccttcgaggccggtgcattgatgggcagtgcatctgtgacgacggcttcacgggcgaggactgcagccagctggcttgccccagcgactgcaatgaccagggcaagtgcgtaaatggagtctgcatctgtttcgaaggctacgccggggctgactgcagccgtgaaatctgcccagtgccctgcagtgaggagcacggcacatgtgtagatggcttgtgtgtgtgccacgatggctttgcaggcgatgactgcaacaagcctctgtgtctcaacaattgctacaaccgtggacgatgcgtggagaatgagtgcgtgtgtgatgagggtttcacgggcgaagactgcagtgagctcatctgccccaatgactgcttcgaccggggccgctgcatcaatggcacctgctactgcgaagaaggcttcacaggtgaagactgcgggaaacccacctgcccacatgcctgccacacccagggccggtgtgaggaggggcagtgtgtatgtgatgagggctttgccggtgtggactgcagcgagaagaggtgtcctgctgactgtcacaatcgtggccgctgtgtagacgggcggtgtgagtgtgatgatggtttcactggagctgactgtggggagctcaagtgtcccaatggctgcagtggccatggccgctgtgtcaatgggcagtgtgtgtgtgatgagggctatactggggaggactgcagccagctacggtgccccaatgactgtcacagtcggggccgctgtgtcgagggcaaatgtgtatgtgagcaaggcttcaagggctatgactgcagtgacatgagctgccctaatgactgtcaccagcacggccgctgtgtgaatggcatgtgtgtttgtgatgacggctacacaggggaagactgccgggatcgccaatgccccagggactgcagcaacaggggcctctgtgtggacggacagtgcgtctgtgaggacggcttcaccggccctgactgtgcagaactctcctgtccaaatgactgccatggccagggtcgctgtgtgaatgggcagtgcgtgtgccatgaaggatttatgggcaaagactgcaaggagcaaagatgtcccagtgactgtcatggccagggccgctgcgtggacggccagtgcatctgccacgagggcttcacaggcctggactgtggccagcactcctgccccagtgactgcaacaacttaggacaatgcgtctcgggccgctgcatctgcaacgagggctacagcggagaagactgctcagaggtgtctcctcccaaagacctcgttgtgacagaagtgacggaagagacggtcaacctggcctgggacaatgagatgcgggtcacagagtaccttgtcgtgtacacgcccacccacgagggtggtctggaaatgcagttccgtgtgcctggggaccagacgtccaccatcatccaggagctggagcctggtgtggagtactttatccgtgtatttgccatcctggagaacaagaagagcattcctgtcagcgccagggtggccacgtacttacctgcacctgaaggcctgaaattcaagtccatcaaggagacatctgtggaagtggagtgggatcctctagacattgcttttgaaacctgggagatcatcttccggaatatgaataaagaagatgagggagagatcaccaaaagcctgaggaggccagagacctcttaccggcaaactggtctagctcctgggcaagagtatgagatatctctgcacatagtgaaaaacaatacccggggccctggcctgaagagggtgaccaccacacgcttggatgcccccagccagatcgaggtgaaagatgtcacagacaccactgccttgatcacctggttcaagcccctggctgagatcgatggcattgagctgacctacggcatcaaagacgtgccaggagaccgtaccaccatcgatctcacagaggacgagaaccagtactccatcgggaacctgaagcctgacactgagtacgaggtgtccctcatctcccgcagaggtgacatgtcaagcaacccagccaaagagaccttcacaacaggcctcgatgctcccaggaatcttcgacgtgtttcccagacagataacagcatcaccctggaatggaggaatggcaaggcagctattgacagttacagaattaagtatgcccccatctctggaggggaccacgctgaggttgatgttccaaagagccaacaagccacaaccaaaaccacactcacaggtctgaggccgggaactgaatatgggattggagtttctgctgtgaaggaagacaaggagagcaatccagcgaccatcaacgcagccacagagttggacacgcccaaggaccttcaggtttctgaaactgcagagaccagcctgaccctgctctggaagacaccgttggccaaatttgaccgctaccgcctcaattacagtctccccacaggccagtgggtgggagtgcagcttccaagaaacaccacttcctatgtcctgagaggcctggaaccaggacaggagtacaatgtcctcctgacagccgagaaaggcagacacaagagcaagcccgcacgtgtgaaggcatccactgaacaagcccctgagctggaaaacctcaccgtgactgaggttggctgggatggcctcagactcaactggaccgcagctgaccaggcctatgagcactttatcattcaggtgcaggaggccaacaaggtggaggcagctcggaacctcaccgtgcctggcagccttcgggctgtggacataccgggcctcaaggctgctacgccttatacagtctccatctatggggtgatccagggctatagaacaccagtgctctctgctgaggcctccacaggggaaactcccaatttgggagaggtcgtggtggccgaggtgggctgggatgccctcaaactcaactggactgctccagaaggggcctatgagtactttttcattcaggtgcaggaggctgacacagtagaggcagcccagaacctcaccgtcccaggaggactgaggtccacagacctgcctgggctcaaagcagccactcattataccatcaccatccgcggggtcactcaggacttcagcacaacccctctctctgttgaagtcttgacagaggaggttccagatatgggaaacctcacagtgaccgaggttagctgggatgctctcagactgaactggaccacgccagatggaacctatgaccagtttactattcaggtccaggaggctgaccaggtggaagaggctcacaatctcacggttcctggcagcctgcgttccatggaaatcccaggcctcagggctggcactccttacacagtcaccctgcacggcgaggtcaggggccacagcactcgaccccttgctgtagaggtcgtcacagaggatctcccacagctgggagatttagccgtgtctgaggttggctgggatggcctcagactcaactggaccgcagctgacaatgcctatgagcactttgtcattcaggtgcaggaggtcaacaaagtggaggcagcccagaacctcacgttgcctggcagcctcagggctgtggacatcccgggcctcgaggctgccacgccttatagagtctccatctatggggtgatccggggctatagaacaccagtactctctgctgaggcctccacagccaaagaacctgaaattggaaacttaaatgtttctgacataactcccgagagcttcaatctctcctggatggctaccgatgggatcttcgagacctttaccattgaaattattgattccaataggttgctggagactgtggaatataatatctctggtgctgaacgaactgcccatatctcagggctaccccctagtactgattttattgtctacctctctggacttgctcccagcatccggaccaaaaccatcagtgccacagccacgacagaggccctgccccttctggaaaacctaaccatttccgacattaatccctacgggttcacagtttcctggatggcatcggagaatgcctttgacagctttctagtaacggtggtggattctgggaagctgctggacccccaggaattcacactttcaggaacccagaggaagctggagcttagaggcctcataactggcattggctatgaggttatggtctctggcttcacccaagggcatcaaaccaagcccttgagggctgagattgttacagaagccgaaccggaagttgacaaccttctggtttcagatgccaccccagacggtttccgtctgtcctggacagctgatgaaggggtcttcgacaattttgttctcaaaatcagagataccaaaaagcagtctgagccactggaaataaccctacttgcccccgaacgtaccagggacataacaggtctcagagaggctactgaatacgaaattgaactctatggaataagcaaaggaaggcgatcccagacagtcagtgctatagcaacaacagccatgggctccccaaaggaagtcattttctcagacatcactgaaaattcggctactgtcagctggagggcacccacagcccaagtggagagcttccggattacctatgtgcccattacaggaggtacaccctccatggtaactgtggacggaaccaagactcagaccaggctggtgaaactcatacctggcgtggagtaccttgtcagcatcatcgccatgaagggctttgaggaaagtgaacctgtctcagggtcattcaccacagctctggatggcccatctggcctggtgacagccaacatcactgactcagaagccttggccaggtggcagccagccattgccactgtggacagttatgtcatctcctacacaggcgagaaagtgccagaaattacacgcacggtgtccgggaacacagtggagtatgctctgaccgacctcgagcctgccacggaatacacactgagaatctttgcagagaaagggccccagaagagctcaaccatcactgccaagttcacaacagacctcgattctccaagagacttgactgctactgaggttcagtcggaaactgccctccttacctggcgacccccccgggcatcagtcaccggttacctgctggtctatgaatcagtggatggcacagtcaaggaagtcattgtgggtccagataccacctcctacagcctggcagacctgagcccatccacccactacacagccaagatccaggcactcaatgggcccctgaggagcaatatgatccagaccatcttcaccacaattggactcctgtaccccttccccaaggactgctcccaagcaatgctgaatggagacacgacctctggcctctacaccatttatctgaatggtgataaggctgaggcgctggaagtcttctgtgacatgacctctgatgggggtggatggattgtgttcctgagacgcaaaaacggacgcgagaacttctaccaaaactggaaggcatatgctgctggatttggggaccgcagagaagaattctggcttgggctggacaacctgaacaaaatcacagcccaggggcagtacgagctccgggtggacctgcgggaccatggggagacagcctttgctgtctatgacaagttcagcgtgggagatgccaagactcgctacaagctgaaggtggaggggtacagtgggacagcaggtgactccatggcctaccacaatggcagatccttctccacctttgacaaggacacagattcagccatcaccaactgtgctctgtcctacaaaggggctttctggtacaggaactgtcaccgtgtcaacctgatggggagatatggggacaataaccacagtcagggcgttaactggttccactggaagggccacgaacactcaatccagtttgctgagatgaagctgagaccaagcaacttcagaaatcttgaaggcaggcgcaaacgggcataaattccagggaccactgggtgagagaggaataaggcccagagcgaggaaaggattttaccaaagcatcaatacaaccagcccaaccatcggtccacacctgggcatttggtgagagtcaaagctgaccatggatccctggggccaacggcaacagcatgggcctcacctcctctgtgatttctttctttgcaccaaagacatcagtctccaacatgtttctgttttgttgtttgattcagcaaaaatctcccagtgacaacatcgcaatagttttttacttctcttaggtggctctgggaatgggagaggggtaggatgtacaggggtagtttgttttagaaccagccgtattttacatgaagctgtataattaattgtcattatttttgttagcaaagattaaatgtgtcattggaagccatccctttttttacatttcatacaacagaaaccagaaaagcaatactgtttccattttaaggatatgattaatattattaatataataatgatgatgatgatgatgaaaactaaggatttttcaagagatctttctttccaaaacatttctggacagtacctgattgtattttttttttaaataaaagcacaagtacttttg

SEQ ID NO: 13631 - protein, 2201 aa, Homo sapiens
MGAMTQLLAGVFLAFLALATEGGVLKKVIRHKRQSGVNATLPEENQPVVFNHVYNIKLPVGSQCSVDLESASGEKDLAPPSEPSESFQEHTVDGENQIVFTHRINIPRRACGCAAAPDVKELLSRLEELENLVSSLREQCTAGAGCCLQPATGRLDTRPFCSGRGNFSTEGCGCVCEPGWKGPNCSEPECPGNCHLRGRCIDGQCICDDGFTGEDCSQLACPSDCNDQGKCVNGVCICFEGYAGADCSREICPVPCSEEHGTCVDGLCVCHDGFAGDDCNKPLCLNNCYNRGRCVENECVCDEGFTGEDCSELICPNDCFDRGRCINGTCYCEEGFTGEDCGKPTCPHACHTQGRCEEGQCVCDEGFAGVDCSEKRCPADCHNRGRCVDGRCECDDGFTGADCGELKCPNGCSGHGRCVNGQCVCDEGYTGEDCSQLRCPNDCHSRGRCVEGKCVCEQGFKGYDCSDMSCPNDCHQHGRCVNGMCVCDDGYTGEDCRDRQCPRDCSNRGLCVDGQCVCEDGFTGPDCAELSCPNDCHGQGRCVNGQCVCHEGFMGKDCKEQRCPSDCHGQGRCVDGQCICHEGFTGLDCGQHSCPSDCNNLGQCVSGRCICNEGYSGEDCSEVSPPKDLVVTEVTEETVNLAWDNEMRVTEYLVVYTPTHEGGLEMQFRVPGDQTSTIIQELEPGVEYFIRVFAILENKKSIPVSARVATYLPAPEGLKFKSIKETSVEVEWDPLDIAFETWEIIFRNMNKEDEGEITKSLRRPETSYRQTGLAPGQEYEISLHIVKNNTRGPGLKRVTTTRLDAPSQIEVKDVTDTTALITWFKPLAEIDGIELTYGIKDVPGDRTTIDLTEDENQYSIGNLKPDTEYEVSLISRRGDMSSNPAKETFTTGLDAPRNLRRVSQTDNSITLEWRNGKAAIDSYRIKYAPISGGDHAEVDVPKSQQATTKTTLTGLRPGTEYGIGVSAVKEDKESNPATINAATELDTPKDLQVSETAETSLTLLWKTPLAKFDRYRLNYSLPTGQWVGVQLPRNTTSYVLRGLEPGQEYNVLLTAEKGRHKSKPARVKASTEQAPELENLTVTEVGWDGLRLNWTAADQAYEHFIIQVQEANKVEAARNLTVPGSLRAVDIPGLKAATPYTVSIYGVIQGYRTPVLSAEASTGETPNLGEVVVAEVGWDALKLNWTAPEGAYEYFFIQVQEADTVEAAQNLTVPGGLRSTDLPGLKAATHYTITIRGVTQDFSTTPLSVEVLTEEVPDMGNLTVTEVSWDALRLNWTTPDGTYDQFTIQVQEADQVEEAHNLTVPGSLRSMEIPGLRAGTPYTVTLHGEVRGHSTRPLAVEVVTEDLPQLGDLAVSEVGWDGLRLNWTAADNAYEHFVIQVQEVNKVEAAQNLTLPGSLRAVDIPGLEAATPYRVSIYGVIRGYRTPVLSAEASTAKEPEIGNLNVSDITPESFNLSWMATDGIFETFTIEIIDSNRLLETVEYNISGAERTAHISGLPPSTDFIVYLSGLAPSIRTKTISATATTEALPLLENLTISDINPYGFTVSWMASENAFDSFLVTVVDSGKLLDPQEFTLSGTQRKLELRGLITGIGYEVMVSGFTQGHQTKPLRAEIVTEAEPEVDNLLVSDATPDGFRLSWTADEGVFDNFVLKIRDTKKQSEPLEITLLAPERTRDITGLREATEYEIELYGISKGRRSQTVSAIATTAMGSPKEVIFSDITENSATVSWRAPTAQVESFRITYVPITGGTPSMVTVDGTKTQTRLVKLIPGVEYLVSIIAMKGFEESEPVSGSFTTALDGPSGLVTANITDSEALARWQPAIATVDSYVISYTGEKVPEITRTVSGNTVEYALTDLEPATEYTLRIFAEKGPQKSSTITAKFTTDLDSPRDLTATEVQSETALLTWRPPRASVTGYLLVYESVDGTVKEVIVGPDTTSYSLADLSPSTHYTAKIQALNGPLRSNMIQTIFTTIGLLYPFPKDCSQAMLNGDTTSGLYTIYLNGDKAEALEVFCDMTSDGGGWIVFLRRKNGRENFYQNWKAYAAGFGDRREEFWLGLDNLNKITAQGQYELRVDLRDHGETAFAVYDKFSVGDAKTRYKLKVEGYSGTAGDSMAYHNGRSFSTFDKDTDSAITNCALSYKGAFWYRNCHRVNLMGRYGDNNHSQGVNWFHWKGHEHSIQFAEMKLRPSNFRNLEGRRKRA

SEQ ID NO: 13632 - DNA, 3357 bp, Rattus norvegicus
  ref <308>: DATABASE ACCESSION NUMBER: EMBL / U09631
  ref <309>: DATABASE ENTRY DATE: 2000-03-04
gggaaggcagagagggcgataggcgcgagactgaggaaatccgcgctgggaggccccgagctggggccggtgctgctgagggcgccaaggaccgaggcggcacgctgagcccaggatgagggcgtcggtggtgctgacctgctactgctggttgctggtgcgggtgagcagcatccacccagaatgccggtttcatctggaaatacaggaagaggagacaaaatgcgcagagctgctaagcagccaaatggagaatcacagagcttgcagcggtgtctgggacaacatcacatgctggcgccctgcagacattggggaaactgtcacagtgccctgccccaaagtgttcagcaatttctacagcagaccaggaaacataagcaaaaactgcactagtgatgggtggtcggagacatttccggatttcatagatgcgtgtggctacaacgaccccgaggatgagagtaagatcacgttttatattctggtgaaggccatttataccttgggctacagtgtttctctgatgtctcttacaacaggaagcataattatctgcctcttcaggaagctgcactgcacaaggaactacatccacctgaatctgttcctctccttcatgctgagagccatctctgtgctggtcaaggacagtgtgctctactccagctcaggtacactgcgctgccacgaccagccgggctcctgggttggctgcaagctcagcctggtattcttccagtactgtatcatggcgaacttctactggcttctggtggagggtctctacctgcacaccctcctggtagccatccttcctcccagcaggtgtttcctggcctaccttcttattggatggggtatccccagtgtgtgtataggtgcatggatagcaactcgcctttctttagaagacacaggttgctgggacacgaacgaccacagcatcccctggtgggtcattcggatgcccattctaatttctattgtagtcaactttgccctcttcatcagcattgtaaggatcttacttcagaagctaacttctccagatgttggtggcaatgaccagtcacagtacaagaggctcgccaagtccacactgctgctaatcccactgtttggcgtccactacatggtgtttgctgccttccccattggcatctcctccacgtaccagatcctgtttgagttatgtgttggttccttccagggcctggtggtcgcagttctatattgctttctgaacagtgaggtacagcgtgaactgaaaagaaggtggagaggcctgtgcctgacccagcctgggagccgggactaccggctgcacagctggtccatgtcccggaatggctcagaaagcgccctacagatacaccgtggctcccgtacccagtccttcctgcagtcagagacctcagtcatttagctgtgtccctcatacagagctgacagtgctgctgggtttgacatatgtgtttgccagcttcctctgcttgccccagtgtctggtgccttattgggtcagccctggtccttaactcgattgtaacttgattgaaacaccagttattgttgacagactctagcgtttaagccatcctcttcataatatggcacagccatattctactttcaaagagagcaaggaaaccaggtggccctgaacatcaaaactgggttctagaacgtccgaaaaaaaacaaggaggaagattccagtttctccactgcctcctgtcagggagaaccacgtccagaaccagctgagcatcaccaccctgtggcccagcgcatgcctatggttgtctctgacattcctctcaatctatggcataccagggaaagtggatgaaagcaaccttctcatcctacaagcttcctggtgcccccggccttgagttctgtcctgtggactacatctggacagccacacccttgccattccctggaccatctggtagtgaccaaagataagtcagggaggatattcatggttcagcggccaagccaggaactcatctcctcccagggcacttagcatctgctgcttcctacaagtggtgagcagccctggatcccaggccggctgctggcatgaaggccctcattcatgacttgtccattcagcccaaggttgttctctagctggtagaaaacttcgatttttattttaaagaaaaccaccatcttaaaattgcttaaagagatttattttatcaaagtatgaagaggcatcaagttttcctatccaacatttgccagtaacaatccttatttttccagtgttatttgcaactgtgggcaggcagacctgagggaatgcttgctgtgattgaaaagcagctgcagacagagagtgcctttccttgcggtgtccaaagaccctgggagaccatgtcatggcccagtgcaagggctgtaggttctggacctagtgttcaggcatagtctatgtaacttacaccccaacacacacacacacacacacacaggataaaagctgcaaaatgttttcctgtgctttctgaggcatgtaggccacggccagcatgaataccaatgatctcagcaattgtaccagagccagaggttttggggtcagaaaaatcacaaaagtaggggctccacttctggtacatgggggctttagtacagcagagaagtatctagaaactagctgaggcccgggggccagacatctgtcctgaatgtctgtccacagaacccctcctgcacttttgcctctatccactcttgaaaggcctccagtttgtctgcaactgcacaggatagacacctcagatgatctagaaaacaccactaacctgctgccttgcagggctaccaggctagagaacaggttgtggggaacaaatggcctaggtcagaaacacttaaaagagctgttggcagtgacaaaagatgggtgctacaagccctggtgtcagccttgcctgtctttatacagagctcactgcttactccagcagctcggcggacacacagccctcccatatctgaaagttgtcctatcaaccactaggcgtgaccctgccatgaccctgaagagacatgtagatcctgtgaacacaagcagccactgagtacacacggaacattcagaacaccattccctcagcccagcatgtgctaatgctaactatagctgggtcctcgtcctgggaaagagatcggctgatcacaaagtggtcgctgctggaactcaccagtagcagaggtgtagtaaccatatggccagcgcatgatcttacgtgttgtatgtggaatatctacaaacacaccgcggagtggaactgagttgtgtatatactgcaataaacctgatttcattctg

SEQ ID NO: 13633 - protein, 437 aa, Rattus norvegicus
  ref <308>: DATABASE ACCESSION NUMBER: SWISS-Prot / AAB60459
  ref <309>: DATABASE ENTRY DATE: 2001-10-16
MRASVVLTCYCWLLVRVSSIHPECRFHLEIQEEETKCAELLSSQMENHRACSGVWDNITCWRPADIGETVTVPCPKVFSNFYSRPGNISKNCTSDGWSETFPDFIDACGYNDPEDESKITFYILVKAIYTLGYSVSLMSLTTGSIIICLFRKLHCTRNYIHLNLFLSFMLRAISVLVKDSVLYSSSGTLRCHDQPGSWVGCKLSLVFFQYCIMANFYWLLVEGLYLHTLLVAILPPSRCFLAYLLIGWGIPSVCIGAWIATRLSLEDTGCWDTNDHSIPWWVIRMPILISIVVNFALFISIVRILLQKLTSPDVGGNDQSQYKRLAKSTLLLIPLFGVHYMVFAAFPIGISSTYQILFELCVGSFQGLVVAVLYCFLNSEVQCELKRRWRGLCLTQPGSRDYRLHSWSMSRNGSESALQIHRGSRTQSFLQSETSVI

SEQ ID NO: 13634 - DNA, 2401 bp, Rattus norvegicus
  ref <308>: DATABASE ACCESSION NUMBER: EMBL / U10279
  ref <309>: DATABASE ENTRY DATE: 2000-03-04
cctgacgctgccttctcactgcagataagtgagtagtacaggaccctctcccctctctatgcagccctgtgtctgtgagtgcccagggagcaggcatttaccaggtctggtggctgcgtgttccacacgtcctcatgaggctgaagagccaagcacatggcagacaacacacagaggcaaagagagtccatttccctcacgcctatggcccacggcctggagaacatgggggcagaattcctggaaagcatggaggaaggccgactccctcacagtcactcaagcctgccggagggtgaaggtggcctgaacaaagcagagcggaaggccttctcccgatggaggagtctgcagccgactgtgcaagcgagaagcttctgcagggagcaccggcagctgtttggatggatctgcaaaggcctgctctctactgcatgtcttggcttcttgatggtcgcctgcctcctggacctccagagggccctagcactgttgatcatcacctgtgtggttctcgtctttctggcctatgatctgctaaagaggcttctggggtccaagctgaggaggtgtgtgaagtttcaaggccattcttgcctgagcctctggctgaaaagaggtctagcccttgctgctggtgtgggcctgatcttgtggctatctctggacaccgcccagcggcctgaacagctggtgtcctttgcagggatctgtgtgttccttgtccttctctttgctggctcaaagcatcaccgtgcggtgtcatggcgagctgtgtcctggggccttgggctgcagtttgtgcttgggctcttcgtcatcagaacagaaccagggttcattgcattccagtggctaggggatcagatccaggtcttcctgagttacaccgaggcaggctccagcttcgtcttcggagaggctctggtgaaggatgtctttgcctttcaggttttgcccatcatcatcttcttcagctgcgtcatgtctgttctgtactatctgggcctcatgcagtgggtgatcctgaagattgcctggttgatgcaggtcaccatgggcacctcagccaccgagacactgagtgtggcgggaaacatctttgtgagccagactgaagctcctctgctgatccggccctatctggcagacatgacactctctgaagttcacgttgtcatgactggaggctatgctaccattgctggcagcctcctgggcgcctacatctcctttgggatcgacgctgcttccttaatcgcagcctctgtcatggccgccccttgtgcgttggctctctccaagctggtctacccagaggtggaggagtccaagttccggagtgagaatggcgtgaagctgacctatggagacgctcagaacctcttggaagcagccagtgctggggctgccatctcagtgaaggtcgttgccaacattgctgccaatctgattgccttcctggctgtactagccttcgtcaatgctgccctctcctggctaggggacatggtggacatccagggactcagcttccagctcatctgctcctacgtcctgcggcctgtggccttcttgatgggtgtggcctgggaggactgtccggtagtggctgagttgctgggcatcaagttctttctgaatgagtttgtggcctatcaagagctttcccagtacaagcaacgacgcctggcaggggctgaggagtggcttggtgacaagaaacagtggatctctgtcagagcagaaatcctgactacatacgccctctgtggatttgccaacttcagctccatcggcatcatgttgggaggcctgacctccctagtcccccagcggaggagcgacttctcccagattgtactccgggcactgatcacaggggctttcgtgtccctgctaaacgcctgtgtggcagggatcctctatgtacccaggggggtcgaggtggactgcgtgtcccttctgaaccaaactgtcagcagcagcagctttgaggtttacctgtgctgccgccaagtcttccagagcactagctcggagttcagccaagtggcactggacaactgctgtcgattttacaaccacacagtctgcacatagctgggacggagcatcttcctagcctcagggctcatccagcccagagaggccgtgggactcgtcactacctccatcccacaattgggaagggtgcaacggtcatcgctgctcccatgtctgcctctccaagtacgagttcccagagtctggtctgctctcctgccctttgggagccaacattctggtcctcttgagtcctctttccttgggaacctcatgtgcaccagccaaaagcctcctccctgctccctcccaagcacccagcttgttgggtatccccccaaaagctgtctctaga

SEQ ID NO: 13635 - protein, 649 aa, Rattus norvegicus
  misc_feature (1)..(649): Xaa=Unknown amino acid
MADNTQRQRESISLTPMAHGLENMGAEFLESMEEGRLPHSHSSLPEGEGGLNKAERKAFSRWRSLQPTVQARSFCREHRQLFGWICKGLLSTACLGFLMVACLLDLQRALALLIITCVVLVFLAYDLLKRLLGSKLRRCVKFQGHSCLSLWLKRGLALAAGVGLILWLSLDTAQRPEQLVSFAGICVFLVLLFAGSKHHRAVSWRAVSWGLGLQFVLGLFVIRTEPGFIAFQWLGDQIQVFLSYTEAGSSFVFGEALVKDVFAFQVLPIIIFFSCVMSVLYYLGLMQWVILKIAWLMQVTMGTSATETLSVAGNIFVSQTEAPLLIRPYLADMTLSEVHVVMTGGYATIAGSLLGAYISFGIDAASLIAASVMAAPCALALSKLVYPEVEESKFRSENGVKLTYGDAQNLLEAASAGAAISVKVVANIAANLIAFLAVLAFVNAALSWLGDMVDIQGLSFQLICSYVLRPVAFLMGVAWEDCPVVAELLGIKFFLNEFVAYQELSQYKQRRLAGAEEWLGDKKQWISVRAEILTTYALCGFANFSSIGIMLGGLTSLVPQRRSDFSQIVLRALITGAFVSLLNACVAGILYVPRGVEVDCVSLLNQTVSSSSFEVYLCCRQVFQSTSSEFSQVALDNCCRFYNHTVCTX

SEQ ID NO: 13636 - DNA, 2078 bp, Homo sapiens
  ref <308>: DATABASE ACCESSION NUMBER: EMBL / U62968
  ref <309>: DATABASE ENTRY DATE: 1999-07-02
tggaaggtctgggacatggagaacgacccctcgagacgaagagagtccatctctctcacacctgtggccaagggtctggagaacatgggggctgatttcttggaaagcctggaggaaggccagctccctaggagtgacttgagccccgcagagatcaggagcagctggagcgaggcggcgccgaagcccttctccagatggaggaacctgcagccagccctgagagccagaagcttctgcagggagcacatgcagctgtttcgatggatcggcacaggcctgctctgcactgggctctctgccttcctgctggtggcctgcctcctggatttccagagggccctggctctgtttgtcctcacctgtgtggtcctcaccttcctgggccaccgcctgctgaaacggcttctggggccaaagctgaggaggtttctcaagcctcagggccatccccgcctgctgctctggtttaagaggggtctagctcttgctgctttcctgggcctggtcctgtggctgtctctggacacctcccagcggcctgagcaactggtgtccttcgcaggaatctgcgtgttcatcgctctcctctttgcctgctcaaagcatcattgcgcagtgtcctggagggccgtgtcttggggacttggactgcagtttgtacttggactcctcgtcatcagaacagaaccaggattcattgcgttcgagtggctgggcgagcagatccggatcttcctgagctacacgaaggctggctccagcttcgtgtttggggaggcgctggtcaaggatgtctttgcctttcaggttctgcccatcattgtctttttcagctgtgtcatatccgttctctaccacgtgggcctcatgcagtgggtgatcctgaagattgcctggctgatgcaagtcaccatgggcaccacagccactgagaccctgagtgtggctggaaacatctttgtgagccagaccgaggctccattactgatccggccctacttggcagacatgacactctctgaagtccacgttgtcatgaccggaggttacgccaccattgctggcagcctgctgggtgcctacatctcctttgggatcgatgccacctcgttgattgcagcctctgtgatggctgccccttgtgccttggccctctccaagctggtctacccggaggtggaggagtccaagtttaggagggaggaaggagtgaaactgacctatggagatgctcagaacctcatagaagcagccagcactggggccgccatctccgtgaaggtggtcgccaacatcgctgccaacctgattgcgttcctggctgtgctggactttatcaatgctgccctctcctggctgggagacatggtggacatccaggggctcagcttccagctcatctgctcctacatcctgcggcctgtagccttcttgatgggtgtggcgtgggaggactgcccagtggtagctgagctgctggggatcaagctgtttctgaacgagtttgtggcctatcaagacctctccaagtacaagcaacgccgcctggcaggggccgaggagtgggtcggcaacaggaagcagtggatctccgtcagagctgaagtcctcacgacgtttgccctctgtggatttgccaatttcagctccattgggatcatgctgggaggcttgacctccatggtcccccaacggaagagcgacttctcccagatagtgctccgggcgctcttcacgggagcctgtgtgtccctggtgaacgcctgtatggcagggatcctctacatgcccaggggggctgaagttgactgcatgtccctcttgaacacgaccctcagcagcagtagctttgagatttaccagtgctgccgtgaggccttccagagcgtcaatccagagttcagcccagaggccctggacaactgctgtcggttttacaaccacacgatctgtgcacagtgaggacagaacatgcttgtgcttctgcgcttctgagggctgttctcccccgggaaccatctgtccccaccttccctttcccagagccctcttcagggaagccacaggacttagat

SEQ ID NO: 13637 - protein, 649 aa, Homo sapiens
  ref <308>: DATABASE ACCESSION NUMBER: SWISS-Prot / AAB53839
  ref <309>: DATABASE ENTRY DATE: 2002-06-15
MENDPSRRRESISLTPVAKGLENMGADFLESLEEGQLPRSDLSPAEIRSSWSEAAPKPFSRWRNLQPALRARSFCREHMQLFRWIGTGLLCTGLSAFLLVACLLDFQRALALFVLTCVVLTFLGHRLLKRLLGPKLRRFLKPQGHPRLLLWFKRGLALAAFLGLVLWLSLDTSQRPEQLVSFAGICVFIALLFACSKHHCAVSWRAVSWGLGLQFVLGLLVIRTEPGFIAFEWLGEQIRIFLSYTKAGSSFVFGEALVKDVFAFQVLPIIVFFSCVISVLYHVGLMQWVILKIAWLMQVTMGTTATETLSVAGNIFVSQTEAPLLIRPYLADMTLSEVHVVMTGGYATIAGSLLGAYISFGIDATSLIAASVMAAPCALALSKLVYPEVEESKFRREEGVKLTYGDAQNLIEAASTGAAISVKVVANIAANLIAFLAVLDFINAALSWLGDMVDIQGLSFQLICSYILRPVAFLMGVAWEDCPVVAELLGIKLFLNEFVAYQDLSKYKQRRLAGAEEWVGNRKQWISVRAEVLTTFALCGFANFSSIGIMLGGLTSMVPQRKSDFSQIVLRALFTGACVSLVNACMAGILYMPRGAEVDCMSLLNTTLSSSSFEIYQCCREAFQSVNPEFSPEALDNCCRFYNHTICAQ

SEQ ID NO: 13638 - DNA, 147 bp, Rattus norvegicus; identical to SEQ ID NO: 8093
  ref <308>: DATABASE ACCESSION NUMBER: EMBL / U11071
  ref <309>: DATABASE ENTRY DATE: 2002-08-27

SEQ ID NO: 13639 - DNA, 408 bp, Rattus norvegicus
  ref <308>: DATABASE ACCESSION NUMBER: EMBL / U15764
  ref <309>: DATABASE ENTRY DATE: 2000-03-04
atgatgcaggaccgagaagatcagtccatcctttgcacgggtgagtctggagcaggcaagacagagaacaccaagaaagtcatccagtacctggcacatgtggcctcctcacacaagagcaagaaggaccagggggagctggagcgccaactgctgcaggccaaccctatcctagaggcctttggaaacgccaagacggtgaagaatgacaactcttcacgatttggtaaattcattcgtatcaactttgatgtcaacggctacatcgttggggccaacattgagacttatcttctggagaaatctcgtgctatccgccaagccaaggaggaacgaaccttccacattttttactacctgctgtctggggccggagagcacctgaagactgatctcctgttggagcca

SEQ ID NO: 13640 - protein, 136 aa, Rattus norvegicus
  ref <308>: DATABASE ACCESSION NUMBER: SWISS-Prot / AAA89109
  ref <309>: DATABASE ENTRY DATE: 2003-02-01
MMQDREDQSILCTGESGAGKTENTKKVIQYLAHVASSHKSKKDQGELERQLLQANPILEAFGNAKTVKNDNSSRFGKFIRINFDVNGYIVGANIETYLLEKSRAIRQAKEERTFHIFYYLLSGAGEHLKTDLLLEP

SEQ ID NO: 13641 - DNA, 2164 bp, Homo sapiens
  ref <308>: DATABASE ACCESSION NUMBER: EMBL / M69180
  ref <309>: DATABASE ENTRY DATE: 2000-03-04
gtcctggctataagtcaccatggcacagcaagctgccgataagtatctctatgtggataaaaacttcatcaacaatccgctggcccaggccgactgggctgccaagaagctggtatgggtgccttccgacaagagtggctttgagccagccagcctcaaggaggaggtgggcgagagaggccatgtggagctggtggagaatgggaagaaggtgaaggtgaacaaggatgacatccagaagatgaacccgcccaagttctccaaggtggaggacatggcagagctcacgtgcctcaacgaagcctcggtgctgcacaacctcaaggagcgttactactcagggctcatctacacctattcaggcctgttctgtgtggtcatcaatccttacaagaacctgcccatctactctgaagagattgtggaaatgtacaagggcaagaagaggcacgagatgccccctcacatctatgccatcacagacaccgcctacaggagtatgatgcaagaccgagaagatcaatccatcttgtgcactggtgaatctggagctggcaagacggagaacaccaagaaggtcatccagtatctggcgtacgtggcgtcctcgcacaagagcaagaaggaccagggcgagctggagcggcagctgctgcaggccaaccccatcctggaggccttcggcaacgccaagaccgtgaagaatgacaactcctcccgcttcggcaaattcattcgcatcaactttgatgtcaatggctacattgttggagccaacattgagacttatcttttggagaaatctcgtgctatccgccaagccaaggaagaacggaccttccacatcttctattatctcctgtctggggctggagagcacctgaagaccgatctcctgttggagccgtacaacaaataccgcttcctgtccaatggacacgtcaccatccccgggcagcaggacaaggacatgttccaggagaccatggaggccatgaggattatgggcatcccagaagaggagcaaatgggcctgctgcgggtcatctcaggggttcttcagctcggcaacatcgtcttcaagaaggagcggaacactgaccaggcgtccatgcccgacaacacagctgcccaaaaggtgtcccatctcttgggtatcaatgtgaccgatttcaccagaggaatcctcaccccgcgcatcaaggtgggacgggattacgtccagaaggcgcagactaaagagcaggctgactttgccatcgaggccttggccaaggcgacctatgagcggatgttccgctggctggtgctgcgcatcaacaaggctctggacaagaccaagaggcagggcgcctccttcatcgggatcctggacattgccggcttcgagatctttgatctgaactcgtttgagcagctgtgcatcaattacaccaatgagaagctgcagcagctcttcaaccacaccatgttcatcctggagcaggaggagtaccagcgcgagggcatcgagtggaacttcatcgactttggcctcgacctgcagccctgcatcgacctcattgagaagccagcaggccccccgggcattctggccctgctggacgaggagtgctggttccccaaagccaccgacaagagcttcgtggagaaggtgatgcaggagcagggcacccaccccaagttccagaagcccaagcagctgaaggacaaagctgatttctgcattatccactatgccggcaaggtggattacaaagctgacgagtggctgatgaagaacatggatcccctgaatgacaacatcgccacactgctccaccagtcctctgacaagtttgtctcggagctgtggaaggatgtggaccgcatcatcggcctggaccaggtggccggcatgtcggagaccgcactgcccggggccttcaagacgcggaagggcatgttccgcactgtggggcagctttacaaggagcagctggccaagctgatggcatcgctgaggaacacgaaccccaactttgtccgctgcatcatccccaaccacgagaagaaggccggcaagctggacccgcatctcgtgctggaccagctgcgctgcaacggtgttctcgagggcatccgtatctgccgccagggcttccccaacagggtggtcttccag

SEQ ID NO: 13642 - protein, 1960 aa, Homo sapiens
  ref <308>: DATABASE ACCESSION NUMBER: SWISS-Prot / AAA61765
  ref <309>: DATABASE ENTRY DATE: 2002-06-15
MAQQAADKYLYVDKNFINNPLAQADWAAKKLVWVPSDKSGFEPASLKEEVGEEAIVELVENGKKVKVNKDDIQKMNPPKFSKVEDMAELTCLNEASVLHNLKERYYSGLIYTYSGLFCVVINPYKNLPIYSEEIVEMYKGKKRHEMPPHIYAITDTAYRSMMQDREDQSILCTGESGAGKTENTKKVIQYLAYVASSHKSKKDQGELERQLLQANPILEAFGNAKTVKNDNSSRFGKFIRINFDVNGYIVGANIETYLLEKSRAIRQAKEERTFHIFYYLLSGAGEHLKTDLLLEPYNKYRFLSNGHVTIPGQQDKDMFQETMEAMRIMGIPEEEQMGLLRVISGVLQLGNIVFKKERNTDQASMPDNTAAQKVSHLLGINVTDFTRGILTPRIKVGRDYVQKAQTKEQADFAIEALAKATYERMFRWLVLRINKALDKTKRQGASFIGILDIAGFEIFDLNSFEQLCINYTNEKLQQLFNHTMFILEQEEYQREGIEWNFIDFGLDLQPCIDLIEKPAGPPGILALLDEECWFPKATDKSFVEKVMQEQGTHPKFQKPKQLKDKADFCIIHYAGKVDYKADEWLMKNMDPLNDNIATLLHQSSDKFVSELWKDVDRIIGLDQVAGMSETALPGAFKTRKGMFRTVGQLYKEQLAKLMATLRNTNPNFVRCIIPNHEKKAGKLDPHLVLDQLRCNGVLEGIRICRQGFPNRVVFQEFRQRYEILTPNSIPKGFMDGKQACVLMIKALELDSNLYRIGQSKVFFRAGVLAHLEEERDLKITDVIIGFQACCRGYLARKAFAKRQQQLTAMKVLQRNCAAYLKLRNWQWWRLFTKVKPLLQVSRQEEEMMAKEEELVKVREKQLAAENRLTEMETLQSQLMAEKLQLQEQLQAETELCAEAEELRARLTAKKQELEEICHDLEARVEEEEERCQHLQAEKKKMQQNIQELEEQLEEEESARQKLQLEKVTTEAKLKKLEEEQIILEDQNCKLAKEKKLLEDRIAEFTTNLTEEEEKSKSLAKLKNKHEAMITDLEERLRREEKQRQELEKTRRKLEGDSTDLSDQIAELQAQIAELKMQLAKKEEELQAALARVEEEAAQKNMALKKIRELESQISELQEDLESERASRNKAEKQKRDLGEELEALKTELEDTLDSTAAQQELRSKREQEVNILKKTLEEEAKTHEAQIQEMRQKHSQAVEELAEQLEQTKRVKANLEKAKQTLENERGELANEVKVLLQGKGDSEHKRKKVEAQLQELQVKFNEGERVRTELADKVTKLQVELDNVTGLLSQSDSKSSKLTKDFSALESQLQDTQELLQEENRQKLSLSTKLKQVEDEKNSFREQLEEEEEAKHNLEKQIATLHAQVADMKKKMEDSVGCLETAEEVKRKLQKDLEGLSQRHEEKVAAYDKLEKTKTRLQQELDDLLVDLDHQRQSACNLEKKQKKFDQLLAEEKTISAKYAEERDRAEAEAREKETKALSLARALEEAMEQKAELERLNKQFRTEMEDLMSSKDDVGKSVHELEKSKRALEQQVEEMKTQLEELEDELQATEDAKLRLEVNLQAMKAQFERDLQGRDEQSEEKKKQLVRQVREMEAELEDERKQRSMAVAARKKLEMDLKDLEAHIDSANKNRDEAIKQLRKLQAQMKDCMRELDDTRASREEILAQAKENEKKLKSMEAEMIQLQEELAAAERAKRQAQQERDELADEIANSSGKGALALEEKRRLEARIAQLEEELEEEQGNTELINDRLKKANLQIDQINTDLNLERSHAQKNENARQQLERQNKELKVKLQEMEGTVKSKYKASITALEAKIAQLEEQLDNETKERQAACKQVRRTEKKLKDVLLQVDDERRNAEQYKDQADKASTRLKQLKRQLEEAEEEAQRANASRRKLQRELEDATETADAMNREVSSLKNKLRRGDLPFVVPRRMARKGAGDGSDEEVDGKADGAEAKPAE

SEQ ID NO: 13643 - DNA, 1426 bp, Rattus norvegicus; identical to SEQ ID NO: 8158
  ref <308>: DATABASE ACCESSION NUMBER: EMBL / U16245
  ref <309>: DATABASE ENTRY DATE: 2000-03-04

SEQ ID NO: 13644 - protein, 265 aa, Rattus norvegicus; identical to SEQ ID NO: 8159
  ref <308>: DATABASE ACCESSION NUMBER: SWISS-Prot / AAA66221
  ref <309>: DATABASE ENTRY DATE: 1996-10-01

SEQ ID NO: 13645 - DNA, 1316 bp, Homo sapiens; identical to SEQ ID NO: 8160
  ref <308>: DATABASE ACCESSION NUMBER: Refseq / NM_001651
  ref <309>: DATABASE ENTRY DATE: 2000-10-31

SEQ ID NO: 13646 - protein, 265 aa, Homo sapiens; identical to SEQ ID NO: 8161
  ref <308>: DATABASE ACCESSION NUMBER: Refseq / NP_001642
  ref <309>: DATABASE ENTRY DATE: 2000-10-31

SEQ ID NO: 13647 - DNA, 1812 bp, Rattus norvegicus; identical to SEQ ID NO: 8186
  ref <308>: DATABASE ACCESSION NUMBER: EMBL / U17565
  ref <309>: DATABASE ENTRY DATE: 2000-03-04

SEQ ID NO: 13648 - protein, 507 aa, Rattus norvegicus; identical to SEQ ID NO: 8187
  ref <308>: DATABASE ACCESSION NUMBER: SWISS-Prot / AAC18424
  ref <309>: DATABASE ENTRY DATE: 1998-12-15

SEQ ID NO: 13649 - DNA, 2917 bp, Homo sapiens; identical to SEQ ID NO: 8188
  ref <308>: DATABASE ACCESSION NUMBER: Refseq / NM_005915
  ref <309>: DATABASE ENTRY DATE: 2002-11-05

SEQ ID NO: 13650 - protein, 821 aa, Homo sapiens; identical to SEQ ID NO: 8189
  ref <308>: DATABASE ACCESSION NUMBER: Refseq / NP_005906
  ref <309>: DATABASE ENTRY DATE: 2002-11-05

SEQ ID NO: 13651 - DNA, 3608 bp, Rattus norvegicus
  ref <308>: DATABASE ACCESSION NUMBER: EMBL / U18942
  ref <309>: DATABASE ENTRY DATE: 2000-03-04
gggccttgccggcggagctatgtctcaggggttcaggggacccacaggggtgttccctcaccagacacagccctgcttggaccctagctatgagcacagcaagtggagatacctgcagccacgtgggtcggagtcttaccttaggagtttccagctccagcagatagagtttctcaaagggcggctcccagaagcacccttgattggagcacagacccagtcactaccgccattcctcccaggacactggccaaggttcccagggccacctgcccaaggaaaacaaccggaaatctgggggtttcccaggagtgtgactctcagaaatcaggggttccatataggacccccacttcctcctccacacagcaggggtccgccatggagaggtgctgaaggtctttgctcacacttccaggagctgagcatcagtcagaatccagagcagaaggtcctaaaccgcctggaagagcttggtgaggggaaggccaccactgcctacgcgctagccagagagctcaggacccccaaaaaggacatcaatcgtatattgtactccttagaaaggaagggaaaactgcatagaggagtggggaagcctcctttgtggagccttgtgcccttaagtcaggcttgcactcagccccctagagctgtgaattcagacaaggaagtccctcgaggagagcccgatttggacagtgaggacggagaccctgcctctgacttagaaggaccttctgagcttcttgatatggctgaaattaaggagaaaatctgtgactatctgttcaatgtgtcaaagtcctctgccctgaacctggctaagaacattggcctcgccaaggcccgagatgtgaatgcagtgttgattgacttagaaaggcaaggcgatgtctacagggaaggggccactcctcccatctggtacttgacggacaagaagcgtgagaggctgcagatgaagagaagtacacacagtggtcctgcagctaccccagcagctgtctcagaagccactcaaagcacctcattccctacctgccacccaccccaatcaggtggctcaagcagcatggcaacctccaaaagagtggaaaacgggcaggagcctgtgacaaagtatgaaagtaggcacgaggcccgaccaggaccagtacgactgcggcctcatgcttatcacaacggcccctctagagcagggtatgttgcctctgaaaatggcccgtgggccacagatgacatcccagataacttgaatagtatccacacagcaccaggtgagtttcgagccatcatggagatgccctccttctacagccctaccttgccacggtgttcaccctacaagaagctaactgagtgccagctgaagaaccctgtcagcgggttgttagagtatgctcagttcactagtcagacctgtgatttcaacctgatagagcagagtggaccgtcccatgaacctcgatttaaattccaggttgtcatcaatggtcgagagtttcccccagctgaggctggcagcaagaaagttgctaagcaggacgcagcagtgaaagccatggcgattctgcttcgggaagccaaagccaaagacagtggacagccagaagaattgtccaactgtcccatggaggaagacccagagaagccagcagagtcccagccccccagctcctcagcaacatccttgttctctgggaagagcccagttactacactgcttgagtgtatgcacaagctagggaactcctgtgaatttcgtctcctgtccaaagaaggccctgctcatgaccccaagttccagtactgtgtggcagtaggagcccagactttcccctctgtgagtgcccccagcaagaaagtagcaaagcagatggccgcagaggaagccatgaaagctctgcaagaggaggcggccaattccgctgatgaccagtctggaggtgcgaacacagactcacttgatgaatctgtggctcccaacaagatccggaggatcggtgagctcgtaaggtacctgaacaccaaccctgtgggtggcttgttggagtacgcccgctctcatggctttgctgctgagttcaagctcattgaccagtctggacctcctcatgaacccaagtttgtttaccaagcaaaagttgggggccgctggtttccagccgtgtgtgcacacagcaagaaacagggcaagcaagacgcagcggatgcagcccttcgtgtcttgatcggggagagcgagaaggcagagcagttgggtttcgcagaggtaaccccagtaaccggggccagtctcagaagaactatgctactcctttccaggtccccagatgcacatccaaagacacttcctctcactggtagcaccttccacgaccagatagctatgctgagccacagatgcttcaacgctctgaccaacagtttccagccctccctgctcggccgcaagatcctggctgctattattatgaagagagatcctgaggacatgggtgttgttgtcagtttggggactgggaatcgctgtgtgaaaggggactctctcagcctgaaaggagagactgtcaatgactgccatgctgaaatcatctcccggagaggcttcatcaggtttctctacagtgagctgatgaagtacaaccaccacactgccaagaacagcatattcgagctggccaggggaggagagaagctccagataaaaaagacggtttcttttcacctctacatcagcacggcaccatgtggagatggagcccactttgacaaatcctgcagtgaccgtgctgtggaaagcacagagtcccgccattaccctgtctttgaaaatcccaagcaaggcaagcttcgcaccaaggtggagaatggggaaggcacaattcctgtggagtccagtgacattgtacccacgtgggatggcatccggcttggggaaagactccgtaccatgtcctgtagtgacaaaatcctacgctggaatgtgctaggcctgcaaggggcgctgttgacacacttcctacagcctgtgtacctgaaatctgtgacattaggttaccttttcagccaagggcatctgacccgtgctatttgctgccgtgtgaccagagatgggaatgcatttgaggatggactacgttatccctttattgtcaaccaccccaaggtcggccgagtcagtgtgtatgattccaaaaggcagtccggaaagaccaaagagacaagcgtcaactggtgcttggctgatggctatgacctggagatcctggatggcaccaggggcaccgtggatggaccagggaaagagttgtcgcgggtgtctaagaagaatattttccttcagtttaagaagctctgctccttccgagcccgcagagatttgctgcagctctcctatggggaggccaagaaagctgcccgtgactacgacttagccaagaactacttcaagaaaagcctgagggacatgggctatgggaattggatcagcaaaccccaggaggaaaagaacttttatctctgtccagtgcccaatgactgatagtggggtgtgttcccatggggtcagagggaggtcatagcattcctcatcacattgggcc

SEQ ID NO: 13652 - protein, 1175 aa, Rattus norvegicus
  ref <308>: DATABASE ACCESSION NUMBER: SWISS-Prot / AAA65039
  ref <309>: DATABASE ENTRY DATE: 2001-10-16
MSQGFRGPTGVFPHQTQPCLDPSYEHSKWRYLQPRGSESYLRSFQLQQIEFLKGRLPEAPLIGAQTQSLPPFLPGHWPRFPGPPAQGKQPEIWGFPRSVTLRNQGFHIGPPLPPPHSRGPPWRGAEGLCSHFQELSISQNPEQKVLNRLEELGEGKATTAYALARELRTPKKDINRILYSLERKGKLHRGVGKPPLWSLVPLSQACTQPPRAVNSDKEVPRGEPDLDSEDGDPASDLEGPSELLDMAEIKEKICDYLFNVSKSSALNLAKNIGLAKARDVNAVLIDLERQGDVYREGATPPIWYLTDKKRERLQMKRSTHSGPAATPAAVSEATQSTSFPTCHPPQSGGSSSMATSKRVENGQEPVTKYESRHEARPGPVRLRPHAYHNGPSRAGYVASENGPWATDDIPDNLNSIHTAPGEFRAIMEMPSFYSPTLPRCSPYKKLTECQLKNPVSGLLEYAQFTSQTCDFNLIEQSGPSHEPRFKFQVVINGREFPPAEAGSKKVAKQDAAVKAMAILLREAKAKDSGQPEELSNCPMEEDPEKPAESQPPSSSATSLFSGKSPVTTLLECMHKLGNSCEFRLLSKEGPAHDPKFQYCVAVGAQTFPSVSAPSKKVAKQMAAEEAMKALQEEAANSADDQSGGANTDSLDESVAPNKIRRIGELVRYLNTNPVGGLLEYARSHGFAAEFKLIDQSGPPHEPKFVYQAKVGGRWFPAVCAHSKKQGKQDAADAALRVLIGESEKAEQLGFAEVTPVTGASLRRTMLLLSRSPDAHPKTLPLTGSTFHDQIAMLSHRCFNALTNSFQPSLLGRKILAAIIMKRDPEDMGVVVSLGTGNRCVKGDSLSLKGETVNDCHAEIISRRGFIRFLYSELMKYNHHTAKNSIFELARGGEKLQIKKTVSFHLYISTAPCGDGAHFDKSCSDRAVESTESRHYPVFENPKQGKLRTKVENGEGTIPVESSDIVPTWDGIRLGERLRTMSCSDKILRWNVLGLQGALLTHFLQPVYLKSVTLGYLFSQGHLTRAICCRVTRDGNAFEDGLRYPFIVNHPKVGRVSVYDSKRQSGKTKETSVNWCLADGYDLEILDGTRGTVDGPGKELSRVSKKNIFLQFKKLCSFRARRDLLQLSYGEAKKAARDYDLAKNYFKKSLRDMGYGNWISKPQEEKNFYLCPVPND

SEQ ID NO: 13653 - DNA, 6407 bp, Homo sapiens
  ref <308>: DATABASE ACCESSION NUMBER: EMBL / X98559
  ref <309>: DATABASE ENTRY DATE: 2001-02-06
gggtattccctcagcggatactacacccatccatttcaaggctatgagcacagacagctcagataccagcagcctgggccaggatcttcccccagtagtttcctgcttaagcaaatagaatttctcaaggggcagctcccagaagcaccggtgattggaaagcagacaccgtcactgccaccttccctcccaggactccggccaaggtttccagtactacttgcctccagtaccagaggcaggcaagtggacatcaggggtgtccccaggggcgtgcatctcggaagtcaggggctccagagagggttccagcatccttcaccacgtggcaggagtctgccacagagaggtgttgattgcctttcctcacatttccaggaactgagtatctaccaagatcaggaacaaaggatcttaaagttcctggaagagcttggggaagggaaggccaccacagcacatgatctgtctgggaaacttgggactccgaagaaagaaatcaatcgagttttatactccctggcaaagaagggcaagctacagaaagaggcaggaacaccccctttgtggaaaatcgcggtctccactcaggcttggaaccagcacagcggagtggtaagaccagacggtcatagccaaggagccccaaactcagacccgagtttggaaccggaagacagaaactccacatctgtctcagaagatcttcttgagccttttattgcagtctcagctcaggcttggaaccagcacagcggagtggtaagaccagacagtcatagccaaggatccccaaactcagacccaggtttggaacctgaagacagcaactccacatctgccttggaagatcctcttgagtttttagacatggccgagatcaaggagaaaatctgcgactatctcttcaatgtgtctgactcctctgccctgaatttggctaaaaatattggccttaccaaggcccgagatataaatgctgtgctaattgacatggaaaggcagggggatgtctatagacaagggacaacccctcccatatggcatttgacagacaagaagcgagagaggatgcaaatcaagagaaatacgaacagtgttcctgaaaccgctccagctgcaatccctgagaccagaagaaacgcagagttcctcacctgtaatatacccacatcaaatgcctcaaataacatggtaaccacagaaaaagtggagaatgggcaggaacctgtcataaagttagaaaacaggcaagaggccagaccagaaccagcaagactgaaaccacctgttcattacaatggcccctcaaaagcagggtatgttgactttgaaaatggccagtgggccacagatgacatcccagatgacttgaatagtatccgcgcagcaccaggtgagtttcgagccatcatggagatgccctccttctacagtcatggcttgccacggtgttcaccctacaagaaactgacagagtgccagctgaagaaccccatcagcgggctgttagaatatgcccagttcgctagtcaaacctgtgagttcaacatgatagagcagagtggaccaccccatgaacctcgatttaaattccaggttgtcatcaatggccgagagtttcccccagctgaagctggaagcaagaaagtggccaagcaggatgcagctatgaaagccatgacaattctgctagaggaagccaaagccaaggacagtggaaaatcagaagaatcatcccactattccacagagaaagaatcagagaagactgcagagtcccagacccccaccccttcagccacatccttcttttctgggaagagccccgtcaccacactgcttgagtgtatgcacaaattggggaactcctgcgaattccgtctcctgtccaaagaaggccctgcccatgaacccaagttccaatactgtgttgcagtgggagcccaaactttccccagtgtgagtgctcccagcaagaaagtggcaaagcagatggccgcagaggaagccatgaaggccctgcatggggaggcgaccaactccatggcttctgataaccagcctgaaggtatgatctcagagtcacttgataacttggaatccatgatgcccaacaaggtcaggaagattggcgagctcgtgagatacctgaacaccaaccctgtgggtggccttttggagtacgcccgctcccatggctttgctgctgaattcaagttggtcgaccagtccggacctcctcacgagcccaagttcgtttaccaagcaaaagttgggggtcgctggttcccagccgtctgcgcacacagcaagaagcaaggcaagcaggaagcagcagatgcggctctccgtgtcttgattggggagaacgagaaggcagaacgcatgggtttcacagaggtaaccccagtgacaggggccagtctcagaagaactatgctcctcctctcaaggtccccagaagcacagccaaagacactccctctcactggcagcaccttccatgaccagatagccatgctgagccaccggtgcttcaacactctgactaacagcttccagccctccttgctcggccgcaagattctggccgccatcattatgaaaaaagactctgaggacatgggtgtcgtcgtcagcttgggaacagggaatcgctgtgtaaaaggagattctctcagcctaaaaggagaaactgtcaatgactgccatgcagaaataatctcccggagaggcttcatcaggtttctctacagtgagttaatgaaatacaactcccagactgcgaaggatagtatatttgaacctgctaagggaggagaaaagctccaaataaaaaagactgtgtcattccatctgtatatcagcactgctccgtgtggagatggcgccctctttgacaagtcctgcagcgaccgtgctatggaaagcacagaatcccgccactaccctgtcttcgagaatcccaaacaaggaaagctccgcaccaaggtggagaacggagaaggcacaatccctgtggaatccagtgacattgtgcctacgtgggatggcattcggctcggggagagactccgtaccatgtcctgtagtgacaaaatcctacgctggaacgtgctgggcctgcaaggggcactgttgacccacttcctgcagcccatttatctcaaatctgtcacattgggttaccttttcagccaagggcatctgacccgtgctatttgctgtcgtgtgacaagagatgggagtgcatttgaggatggactacgacatccctttattgtcaaccaccccaaggttggcagagtcagcatatatgactccaaaaggcaatccgggaagactaaggagacaagcgtcaactggtgtctggctgatggctatgacctggagatcctggacggtaccagaggcactgtggatgggccacggaatgaattgtcccgggtctccaaaaagaacatttttcttctatttaagaagctctgctccttccgttaccgcagggatctactgagactctcctatggtaaggccaagaaagctgcccgtgactacgagacggccaagaactacttcaaaaaaggcctgaaggatatgggctatgggaactggattagcaaaccccaggaggaaaagaacttttatctctgcccagtatagtatgctccagtgacagatggattagggtgtgtcatactaaggtgtgagagaggtaggtcgtagcattcctcatcacatggtcaggggatttttttttctcctttttttttctttttaagccataattggtgatactgaaaactttgggttcccatttatcctgctttctttgggattgctaggcaaggtctggccaggccccccttttttcccccaagtgaagaggcagaaacctaagaagttatcttttctttctacccaaagcatacatagtcactgagcacctgcggtccatttcctcttaaaagttttgttttgatttgtttccatttcctttccctttgtgtttgctacactgacctcttgcggtcttgattaggtttcagtcaactctggatcatgtcagggactgataatttcatttgtggattacgcagacccctctacttcccctctttcccttctgagattctttccttgtgatctgaatgtctccttttccccctcagagggcaaaggtgaacataaaggatttggtgaaacatttgtaagggtagaagttgaaaactgcagttcccagtgccacggaagtgtgattggagcctgcagataatgcccagccatcctcccatcctgcactttagccagctgcagggcgggcaaggcaaggaaagctgcttcctggaagtgtatcactttctccggcagctgggaagtctagaaccagccagactgggttaagggagctgctcaagcaatagcagaggtttcacccggcagatgacacagaccacttcccagggagcacgggcatgcttggaatattgccaagcttccagctgcctcttctcctaaagcattcctaggaatattttccccgccaatgctgggcgtacaccctagccaacgggacaaatcctagagggtataaaatcatctctgctcagataatcatgacttagcaagaataagggcaaaaaatcctgttggcttaacgtcactgttccacccggtgtaatatctctcatgacagtgacaccaagggaagttgactaagtcacatgtaaattaggagtgttttaaagaatgccatagatgttgattcttaactgctacagataacctgtaattgagcagatttaaaattcaggcatacttttccatttatccaagtgctttcatttttccagatggcttcagaagtaggctcgtgggcagggcgcagacctgatctttatagggttgacatagaaagcagtagttgtgggtgaaagggcaggttgtcttcaaactctgtgaggtagaatcctttgtctatacctccatgaacattgactcgtgtgttcagagcctttggcctctctgtggagtctggctctctggctcctgtgcattctttgaatagtcactcgtaaaaactgtcagtgcttgaaactgtttcctttactcatgttgaagggactttgttgtcttttagagtgttggtcatgactccaagagcagagcagggaagagcccaagcatagacttggtgccgtggtgatggctgcagtccagttttgtgatgctagcttttacgtgtccctcgataacagtcagctagacacactcaggaggactactgaggctctgcgaccttcaggagctgagcctgcctctctcctttagatgacagaccttcatctgggaacgtgctgagccagcaccctcagatgatttccctccaaactgctgactaggtcatcctctgtctggtagagacattcacatctttgcttttattctatgctctctgtacttttgaccaaaaattgaccaaagtaagaaaatgcaagttctaaaaatagactaaggatgcctttgcagaacaccaaagcatcccaaggaactggtagggaagtggcgcctgtctcctggagtggaagaggcctgctccctggctctgggtctgctgggggcacagtaaatcagtcttggcacccacatccagggcagagaggtctgtggttctcagcatcagaaggcagcgcagcccctctcctcttcaggctacagggttgtcacctgctgagtcctcaggttgtttggcctctctggtccatcttgggcattaggttctccagcagagctctggccagctgcctcttctttaactgggaacacaggctctcacaagatcagaacccccactcacccccaagatcttatctagcaagcctgtagtattcagtttctgttgtaggaagagagcgaggcatccctgaattccacgcatctgctcgaaacgagccgtgtcagatcgcacatccctgcgcccccatgcccccatgcccctctgagtcacacaggacagaggaggcagagcttctgcccactgttatcttcactttctttgtccagtcttttgtttttaataagcagtgaccctccctactcttctttttaatgatttttgtagttgatttgtctgaactgtggctaatgtgcattccttgaataatcacttgtaaaaattgtcagtgcttgaagctgtttcctttactcacattgaagggacttcgttggccccccggagtcttggttgtgactccaagagcagagtgaggaagacccccaagcatagactcgggtactgtgatgatggctgcagtccagttttatgattctgcttttatgtgtcccttgataacagtgacttaacaatatacattcctcataaataaaaaaaaaacaagaatctg

SEQ ID NO: 13654 - protein, 1221 aa, Homo sapiens
  ref <308>: DATABASE ACCESSION NUMBER: SWISS-Prot / CAA67169
  ref <309>: DATABASE ENTRY DATE: 2003-02-01
GYSLSGYYTHPFQGYEHRQLRYQQPGPGSSPSSFLLKQIEFLKGQLPEAPVIGKQTPSLPPSLPGLRPRFPVLLASSTRGRQVDIRGVPRGVHLGSQGLQRGFQHPSPRGRSLPQRGVDCLSSHFQELSIYQDQEQRILKFLEELGEGKATTAHDLSGKLGTPKKEINRVLYSLAKKGKLQKEAGTPPLWKIAVSTQAWNQHSGVVRPDGHSQGAPNSDPSLEPEDRNSTSVSEDLLEPFIAVSAQAWNQHSGVVRPDSHSQGSPNSDPGLEPEDSNSTSALEDPLEFLDMAEIKEKICDYLFNVSDSSALNLAKNIGLTKARDINAVLIDMERQGDVYRQGTTPPIWHLTDKKRERMQIKRNTNSVPETAPAAIPETRRNAEFLTCNIPTSNASNNMVTTEKVENGQEPVIKLENRQEARPEPARLKPPVHYNGPSKAGYVDFENGQWATDDIPDDLNSIRAAPGEFRAIMEMPSFYSHGLPRCSPYKKLTECQLKNPISGLLEYAQFASQTCEFNMIEQSGPPHEPRFKFQVVINGREFPPAEAGSKKVAKQDAAMKAMTILLEEAKAKDSGKSEESSHYSTEKESEKTAESQTPTPSATSFFSGKSPVTTLLECMHKLGNSCEFRLLSKEGPAHEPKFQYCVAVGAQTFPSVSAPSKKVAKQMAAEEAMKALHGEATNSMASDNQPEGMISESLDNLESMMPNKVRKIGELVRYLNTNPVGGLLEYARSHGFAAEFKLVDQSGPPHEPKFVYQAKVGGRWFPAVCAHSKKQGKQEAADAALRVLIGENEKAERMGFTEVTPVTGASLRRTMLLLSRSPEAQPKTLPLTGSTFHDQIAMLSHRCFNTLTNSFQPSLLGRKILAAIIMKKDSEDMGVVVSLGTGNRCVKGDSLSLKGETVNDCHAEIISRRGFIRFLYSELMKYNSQTAKDSIFEPAKGGEKLQIKKTVSFHLYISTAPCGDGALFDKSCSDRAMESTESRHYPVFENPKQGKLRTKVENGEGTIPVESSDIVPTWDGIRLGERLRTMSCSDKILRWNVLGLQGALLTHFLQPIYLKSVTLGYLFSQGHLTRAICCRVTRDGSAFEDGLRHPFIVNHPKVGRVSIYDSKRQSGKTKETSVNWCLADGYDLEILDGTRGTVDGPRNELSRVSKKNIFLLFKKLCSFRYRRDLLRLSYGKAKKAARDYETAKNYFKKGLKDMGYGNWISKPQEEKNFYLCPV

SEQ ID NO: 13655 - DNA, 2488 bp, Rattus norvegicus
  ref <308>: DATABASE ACCESSION NUMBER: EMBL / U19516
  ref <309>: DATABASE ENTRY DATE: 2000-03-04
ggcttcccggcggacgtgctgactgcgaagcaaaatggcagccactgcggcggttcccagcgctgtaggcggccgagcgaacaaacgcggcggcggctccggcggcggtggaacccaaggtgcggaggaggagccgccgccgcccctccaggcagttttagtggccgatagcttcgaccgccgcttcttccccatctccaaggaccagcctcgggtcctattgcccctggccaatgtcgcgctgatcgactatactctggaattcttgactgccacgggtgtacaggaaacatttgtcttttgctgctggaaggctgctcagatcaaagaacacttacagaaatccaaatggtgccatcctacgtccctcaatgttgttcgaataactacatcagacctgtaccgatcactaggagatgtcctccgtgatgtcgatgccaaggccttggtgcgctctgacttcctcctgatatatggagatgtcgtctcgaatatcaatatttccaaagccctggaggaacacaggttaagaaggaagctagaaaaaaatgtgtctgtcatgacaatggtgttcaaagagtcctcacccagtcaccctacacgctgccatgaggacaatgtggtgctagctgtggatagcaccacaaacaggattcttcacttccagaagacccaaggcctccgccatttctcctttcctttgggcctattccagggcagtctagacggagtggagattcgatatgacttgttggattgtcacatcagcatctgctctcctcaggtagctcagctcttcacagacaactttgactaccaaactcgagatgattttgtgcgaggcctgctagtgaatgaggagatcctaggaaatcagattcacttgcatgtgacaagtagggaatatggtagccgggtctccaacctacacatgtactctgctgtctgtactgacgtcatccgccgatgggtctaccctcttactccagaagtcaacttcactgacagcagtacacaaagctacactcattcccgacacaacatctaccgagggcctgaagtcagcctgggccacggcagcgtcctggaggaaaacgtgcttctgggagctggcactgtcgttggcagcaactgctccatcaccaacagtgtcattggccctaactgccacattggtgataatgtggtactggaccaggcctacctgtggcagggagttcgagtggctgctggagcacaaatacaccagtctcttctctgtgacagagctgaggtcaaggagcgagtcatactgaagccacactgtgtcctcacttcccaggtggtagtgggcccagacatcatactgcccgagggctcggtgatctctttgcaccctccagatgcagaggaagatgaagatgatggccagtttagtgatgattctggcgctgaccaagaaaaggagaaagtgaagctgaaaggttacaatccggcagaagttggccctgaaggccagggatacctctggaaagctgaggatgtggatgagaaggaagatgaggagctgcggcagagtctctggggactcatgatcaatatggaggaggaaagtgagacggaaagtgagcggagcgtggatcccgaggagctggacagccgagcaggctcccctcagctggatgacatcagagttttccagaacgaggtcttaggaacgctgcagcggggcagagaggagaacatctcctgtgacaatctagtcctggagatcaactccctcaagtatgcctacaacattagcctaaaggaagtgatgcaggtcctgagccatgtggtcctggagttccccctgcaacaagtagatggcgtgcttgacccaaaccgctactgtgccctgctgcttcctctgctcaaagcctggagccctgtttttcggaactacataaagcgcgcagctgaccatttggaagcattggcggccattgaggacttcttcttggaacatgaaactcttgttccttccctggccaaggtcctgatggctttctaccagctggagatcttggctgaggaaacaatcttgagctggttcagccaaagagacataactgacaaaggccagcagttacgtaagaatcaacagctgcagaggttcatccagtggctgagagaggcagaagaggagtcatctgacgatgactgatggtgactgccggatccatgcatctcattggctgtcctagcagatagggcaaaacaagaaagcttgctacagaagcatgagcggccactacagactgagaattaatggaacggaagttgcaactacagtattcttcctactgctgggaaccatgtgcttctcgtcctgactgaagtaggatgaaggaagttagactgaactaggggaaatatagacagaccctgcagttgggggttggccagaggaagcactttgtgtttcagctttccctcagggagcagtaaagagcagctggtactccca

SEQ ID NO: 13656 - protein, 716 aa, Rattus norvegicus
  ref <308>: DATABASE ACCESSION NUMBER: SWISS-Prot / Q64350
  ref <309>: DATABASE ENTRY DATE: 1999-07-15
MAATAAVPSAVGGRANKRGGGSGGGGTQGAEEEPPPPLQAVLVADSFDRRFFPISKDQPRVLLPLANVALIDYTLEFLTATGVQETFVFCCWKAAQIKEHLQKSKWCHPTSLNVVRITTSDLYRSLGDVLRDVDAKALVRSDFLLIYGDVVSNINISKALEEHRLRRKLEKNVSVMTMVFKESSPSHPTRCHEDNVVLAVDSTTNRILHFQKTQGLRHFSFPLGLFQGSLDGVEIRYDLLDCHISICSPQVAQLFTDNFDYQTRDDFVRGLLVNEEILGNQIHLHVTSREYGSRVSNLHMYSAVCTDVIRRWVYPLTPEVNFTDSSTQSYTHSRHNIYRGPEVSLGHGSVLEENVLLGAGTVVGSNCSITNSVIGPNCHIGDNVVLDQAYLWQGVRVAAGAQIHQSLLCDRAEVKERVILKPHCVLTSQVVVGPDIILPEGSVISLHPPDAEEDEDDGQFSDDSGADQEKEKVKLKGYNPAEVGPEGQGYLWKAEDVDEKEDEELRQSLWGLMINMEEESETESERSVDPEELDSRAGSPQLDDIRVFQNEVLGTLQRGREENISCDNLVLEINSLKYAYNISLKEVMQVLSHVVLEFPLQQVDGVLDPNRYCALLLPLLKAWSPVFRNYIKRAADHLEALAAIEDFFLEHETLVPSLAKVLMAFYQLEILAEETILSWFSQRDITDKGQQLRKNQQLQRFIQWLREAEEESSDDD

SEQ ID NO: 13657 - DNA, 2291 bp, Homo sapiens
  ref <308>: DATABASE ACCESSION NUMBER: EMBL / U23028
  ref <309>: DATABASE ENTRY DATE: 1999-07-01
gaattcctgactgccacaggtgtacaggaaacatttgtcttttgttgctggaaagctgctcaaatcaaagaacatttactgaagtcaaagtggtgccgccctacatctctcaatgtggttcgaataattacatcagagctctatcgatcactgggagatgtcctccgtgatgttgatgccaaggctttggtgcgctctgactttcttctggtgtatggggatgtcatctcaaacatcaatatcaccagagcccttgaggaacacaggttgagacggaagctagaaaaaaatgtttctgtgatgacgatgatcttcaaggagtcatcccccagccacccaactcgttgccacgaagacaatgtggtagtggctgtggatagtaccacaaacagggttctccattttcagaagacccagggtctccggcgttttgcatttcctctgagcctgtttcagggcagtagtgatggagtggaggttcgatatgatttactggattgtcatatcagcatctgttctcctcaggtggcacaactctttacagacaactttgactaccaaactcgagatgactttgtgcgaggtctcttagtgaatgaggagatcctagggaaccagatccacatgcacgtaacagctaaggaatatggtgcccgtgtctccaacctacacatgtactcagctgtctgtgctgacgtcatccgccgatgggtctaccctctcaccccagaggcgaacttcactgacagcaccacccagagctgcactcattcccggcacaacatctaccgagggcctgaggtcagcctgggccatggcagcatcctagaggaaaatgtgctcctgggctctggcactgtcattggcagcaattgctttatcaccaacagtgtcattggccccggctgccacattggtgataacgtggtgctggaccagacctacctgtggcagggtgttcgagtggcggctggagcacagatccatcagtctctgctttgtgacaatgctgaggtcaaggaacgagtgacactgaaaccacgctctgtcctcacttcccaggtggtcgtgggcccaaatatcacgctgcctgagggctcggtgatctctttgcaccctccagatgcagaggaagatgaagatgatggcgagttcagtgatgattctggggctgaccaagaaaaggacaaagtgaagatgaaaggttacaatccagcagaagtaggagctgctggcaagggctacctctggaaagctgcaggcatgaacatggaggaagaggaggaactgcagcagaatctgtggggactcaagatcaacatggaagaagagagtgaaagtgaaagtgagcaaagtatggattctgaggagccggacagccggggaggctcccctcagatggatgacatcaaagtgttccagaatgaagttttaggaacactacagcggggcaaagaggagaacatttcttgtgacaatctcgtcctggaaatcaactctctcaagtatgcctataacgtaagtctaaaggaggtgatgcaggtactgagccacgtggtcctggagttccccctgcaacagatggattccccgcttgactcaagccgctactgtgccctgctgcttcctctgctaaaggcctggagccctgtttttaggaactacataaagcgcgcagccgaccatttggaagcgttagcagccattgaggacttcttcctagagcatgaagctcttggtatttccatggccaaggtactgatggctttctaccagctggagatcctggctgaggaaacaattctgagctggttcagccaaagagatacaactgacaagggccagcagttgcgcaagaatcaacagctgcagaggttcatccagtggctaaaagaggcagaagaggagtcatctgaagatgactgaagtcacactgcctgctcctttgggtgtgattgagtgccctcctggctcctgggctgggacaagtgaggaactagctgcagagggatgagtgaccaccatccaggctgagactgaaaggagcagaggctggaactacagtattctttcccctgctagcaaccatgtgcctcccatcctgactgtggagttgggatgtggaagtggggctggaacaaagcttctgcctagggaggagctaagcaggcccggcagttggaggaaggccagaggaacagctttgtgctccggctttccctcagggaacagcagagagcagttggctctttctgctgcttgtatatgttaatattaaaagagagtggtgt

SEQ ID NO: 13658 - protein, 721 aa, Homo sapiens
  ref <308>: DATABASE ACCESSION NUMBER: SWISS-Prot / Q13144
  ref <309>: DATABASE ENTRY DATE: 2002-06-15
MAAPVVAPPGVVVSRANKRSGAGPGGSGGGGARGAEEEPPPPLQAVLVADSFDRRFFPISKDQPRVLLPLANVALIDYTLEFLTATGVQETFVFCCWKAAQIKEHLLKSKWCRPTSLNVVRIITSELYRSLGDVLRDVDAKALVRSDFLLVYGDVISNINITRALEEHRLRRKLEKNVSVMTMIFKESSPSHPTRCHEDNVVVAVDSTTNRVLHFQKTQGLRRFAFPLSLFQGSSDGVEVRYDLLDCHISICSPQVAQLFTDNFDYQTRDDFVRGLLVNEEILGNQIHMHVTAKEYGARVSNLHMYSAVCADVIRRWVYPLTPEANFTDSTTQSCTHSRHNIYRGPEVSLGHGSILEENVLLGSGTVIGSNCFITNSVIGPGCHIGDNVVLDQTYLWQGVRVAAGAQIHQSLLCDNAEVKERVTLKPRSVLTSQVVVGPNITLPEGSVISLHPPDAEEDEDDGEFSDDSGADQEKDKVKMKGYNPAEVGAAGKGYLWKAAGMNMEEEEELQQNLWGLKINMEEESESESEQSMDSEEPDSRGGSPQMDDIKVFQNEVLGTLQRGKEENISCDNLVLEINSLKYAYNVSLKEVMQVLSHVVLEFPLQQMDSPLDSSRYCALLLPLLKAWSPVFRNYIKRAADHLEALAAIEDFFLEHEALGISMAKVLMAFYQLEILAEETILSWFSQRDTTDKGQQLRKNQQLQRFIQWLKEAEEESSEDD

SEQ ID NO: 13659 - DNA, 2488 bp, Rattus norvegicus; identical to SEQ ID NO: 13655
  ref <308>: DATABASE ACCESSION NUMBER: EMBL / U19516
  ref <309>: DATABASE ENTRY DATE: 2000-03-04

SEQ ID NO: 13660 - protein, 716 aa, Rattus norvegicus; identical to SEQ ID NO: 13656
  ref <308>: DATABASE ACCESSION NUMBER: SWISS-Prot / Q64350
  ref <309>: DATABASE ENTRY DATE: 1999-07-15

SEQ ID NO: 13661 - DNA, 2291 bp, Homo sapiens; identical to SEQ ID NO: 13657
  ref <308>: DATABASE ACCESSION NUMBER: EMBL / U23028
  ref <309>: DATABASE ENTRY DATE: 1999-07-01

SEQ ID NO: 13662 - protein, 721 aa, Homo sapiens; identical to SEQ ID NO: 13658
  ref <308>: DATABASE ACCESSION NUMBER: SWISS-Prot / Q13144
  ref <309>: DATABASE ENTRY DATE: 2002-06-15

SEQ ID NO: 13663 - DNA, 793 bp, Rattus norvegicus; identical to SEQ ID NO: 8264
  ref <308>: DATABASE ACCESSION NUMBER: EMBL / U24489
  ref <309>: DATABASE ENTRY DATE: 2000-03-04

SEQ ID NO: 13664 - DNA, 4042 bp, Homo sapiens; identical to SEQ ID NO: 8265
  ref <308>: DATABASE ACCESSION NUMBER: EMBL / M26856
  ref <309>: DATABASE ENTRY DATE: 2000-03-04

SEQ ID NO: 13665 - DNA, 5582 bp, Rattus norvegicus
  misc_feature (1)..(5582): n=a, c, g or t
  ref <308>: DATABASE ACCESSION NUMBER: EMBL / U26397
  ref <309>: DATABASE ENTRY DATE: 2000-03-04
cgggcgggcttctcggggagctctgtgatgctctacatcgagcctgccggcagcatctctactggatcccacaggcatccaacgctggaggcctcgcggtatctcgggtgtcaacacaccggatgatggatctgtttgtccttccgtgacgcaatgccatgtagtccaacggcaagcatgtatgggatactgccattgtagggatccagggcctggagacggctctgctttggggaatcaggtgaggtgaccaaggaacaagaagcataccctcaccaatgacatcatgacagcaagagagcacagccctcgccatggtgccagggcccgtgcgatgcagcgggcttccaccattgacgtgacagccgacatggtgggcctctctctggcaggaaacatccaagacccagatgagcccattttagagttcagcttagcttgcagtgagcttcacactccatcgctagatcgaaaaccaaatagttttgtggctgtgagtgtcaccacccctccacaggcattctggacgaagcacgcgcagacggagatcatcgagggaaccaacaaccctatctttctgagcagcattgccttctttcaagactctctcatcaatcagatgacccagatcaagctgtcagtgtacgacgtcaaagacagatctcagggaacaatgtacttgctgggctctggaacattcgtggtcaaagacctgctccaggacaggcatcaccgattgcatctgacactgaggtctgcagagagtgaccgagtcggtaacataactgtgatcggctggcagatggaggagaagtcagaccagcagccccctgtgacccggtctctggacactgtcaatggcaggatggttttgcccgttgacgagagcttgaccgaggccttgggaatccgatccaaatatgcttctttgcgaaaagacagcttactgaaagcggtgtttggtggtgccatctgccgcatgtaccgcttcccaaccaccgatggcaaccacctacggatcctggagcagatggcagagagcgtcctctcgctgcacgtgcctcggcagtttgtgaagctcctgctggaagaagatgcagccagagtctgtgagttggaagagttgggggagctgtccccttgctgggagagcctccggcgccagattgtcacccagtatcagactattatcctcacctaccaggagaacctgactgacctccatcagtacaaaggtccttcgtttaaagcaagcagcttgaaagcagataaaaagttagaattcgttcccacaaacctgcacatacagaggatgcgagttcaggacgacggcggctcagatcagaactacgacgtcgtcactattggagccccagcagcacactgccaaggttttaagtcaggaggtcttcgaaaaaagctgcacaagtttgaagaggccaagaagcacagttttgaggagtgttgtacatcttctacctgccagtccataatctacataccacaggatgtcgtccgggccaaggagatcattgctcagatcaacaccctgaaaacccaagtgagctactatgcagaacggctctcaagggcggcgaaggacaggtctgccactggccttgagaggactctcgccatcttggcagacaagactcggcagttggtgactgtctgtgactgtaagctgttggccaactccatccatgggctgaatgcagcacggcctgactacatcgcttccaaggcctcccctacctcgactgaggaggagcaggtgatgcttcggaatgaccaggacaccctcatggccaggtgggcagggaggagcagccggtcttccctgcaggtggactggcatgaggaagagtgggagaaagtgtggctgaatgtggacaagagcctggagtgcatcattcagcgggtggacaagctgctgcagaaggaacgtctgcatggggagggcggcgaggatgttttcccctgttcaagcacctgttccagcaagaaagattgcagcccccctcctgaagagtcctgtccaggtgagtggagcgaggccctttaccctctgctgaccaccctcacagactgtgtggccatgatgagcgacaaggccaaggcagccatggtcttcctgctcatgcagacagctgcccccacaatcgcctcttacctcagcctgcagtatcgccgtgacgtcgtcttctgccaaaccctgaccgccctcatctgtggctttatcatcaagctgaggaactgcctgcacgatggtggcttcctacggcagctctataccatcgggctcctggcccagtttgagagcctgctgagcacctatggagaggagttggccatgttggaggacatgagccttgggatcatggacctgaggaatgtgacctttaaagtcactcaggccacttcgaatgcttctagtgacatgctgccagtcatcacaggaaaccgggatggctttaacgtgcggattcctctgccaggcccactgtttgactctctccccagagagatccagagcggcatgctgctgcgggtgcagcccgtcctcttcaacgtgggcatcaatgagcaacagacactggccgagaggtttggagacacatccctacaagaagtcatcaatgtggagagcctggtgcggctgaattcctactttgagcagttcaaggaggttttgccagaggactgtctacctcgatctcggagtcagacctgccttccagagctgctgcggtttctaggacagaatgtccatgcacgcaagaataagaatgtggacatcctctggcaagctgctgaggtctgtcgccgccttaatggggtccgattcaccagctgcaagagtgccaaggaccgcacagccatgtcggtgaccctggagcagtgtctgatcctgcagcatgagcacggcatggccccgcaggtcttcacacaagccctggagtgcatgcgcagtgagggttgtcggcgagaaaacacaatgaagaatgttggaagtcgcaaatatgcatttaactccctgcagctgaaggccttccccaagcattacaggcctccagaagggacttacggaaaagttgagacatgaacacacggtgtcctctaattagctgtcatgtaatcaatgtgggtccctctagtgtcacatacattcttcaagaagacctgaaggattggtttttatttctgtgtttttaaagacatgtcactggagagtccacggagcatgattttgtgctggaatctgtagggttacgtgtgggtcgatagcgtggatagaaagccgccctcaaccacagctttcagtgtaactgtacagttaatgtcatagttcctagaagatgccagctaggtctcatacactccagcaggctttctcaaatagccacttaggccctgctcaccccctttacctttctattcagtaactcacaagtgagcactgacttaaaatcttctttcaaaaagactgactataaagcaggaagtacctaacctgtgcacttcaggtcccaggtagagcagcaggtagagcagcaggtagagcagcaggtagagcagcaggtagagcagcaggtagattctgactcagtctgggggagaacctgcatgctatgacaggctggtgctcgtggccctaaaaggcaccaagctctgtgaaccgaaagtggaaggaaagcttggttggtacaccaggagctcacacacctggacccacactgttcctccccctcacaagtcatggatgagtgtctgcttaagatgtaaagccagtattgaggtcctggactctccccccaccccacccccaccccaccccacccccaccccaccccaccccggatgctccgtgtatgtttagccctacccacagggtgtttctccctttgttctccagcagtcaggaccttcaatgtggcttgtcaggtgtctggatttagggccagagagacagtagaaacttagatattttcaaagtagatgttcttctgggagcttcgtaatagtcttctagaagaccaataaatcatgtttgaatgtctagagaaagcatcttagtttctggtttgcaatgatggttacggtcccccttctgtttcacggctattgataaacagttgaaactgtcccctaccttgagagtctgagatgagattatggaacagggaatgagggattttgtagacactgtaatctgctcatcttttacaaggtgacggtgagtcttgtctgcacgtggcagattttttttccttagagatttatatgtttataagttctgttcaccgtaattctgtttacatgttatttaaaaggctgtaaaaagaaatgtatatgaactgtattcgtgacactgatactaatgacctgtaccaccatgggaactcgtaggcaagtctaggtagttttcttttggctcctttagaaaaacacgtaacagcttggatctgaggcatttgaggtatcaataggaccagtcttggcaagagacagggagggtgcgggcatccctctaccccagtgtgcagacagcctcctgtctctggtgcctgctgggaggaagatgtgccctgctaaggggtgtgtgctcactgccccaccctcaaggcaaggcactgtggaaggtgagtggctaagctctctttacccaacccttccctcggggtctgctctgctggtctcacattgtcctgaagcctcaggccctgatcaaagatggctgagtctcagtgcggcggctaagccttttaacttgttgttggttcacttactcttagcttttagtttttgttcgttcatttttttcttattttgacatcactgccttttaaaaatatttcttcagattttagaatgaaatgtttcccatgttctccagngttcctttctgtccacagggcatttgacttgtccacagggcatttgacctgtccacatttataaagggaacaggcgaagctgacttatttgtcagcttctgcatgtgaattcttgtctcagtttctgtttataatatgaatcactgtaaaactctaagacttggctaatcacgtaaaagattgtggcttcagtgttttctctgaaggcattgtgactggcttccagagcatcacacacgcccagaagggtcatctcgcacagcacaggctcagcaagccctgggccgctcacaggaggccgaactgttccctgtggaggaaaacagttctacagctttccagtgaacaacgttccgtccggcacctttccccatttaggaaggaatgtgcagtctctgggcggtgggcatgccgtgcggatcctgtcagagctcctgcagcacatctgcctttactgtcctttaaggatgtataaatgctgtacagtgctgttgtatctcccgacacgtgttttcgctcagcttagtgcatttaaatacttgtatttatttatttgtttgggacatattaatatatatgaacatatagttactgttttatatattattagcttattcaaagccatgatgctgtaaatgtgcttgtctttagaatgataaataataaaaactgacaagaacattg

SEQ ID NO: 13666 - protein, 939 aa, Rattus norvegicus [sequence omitted]

SEQ ID NO: 13667 - DNA, 3217 bp, Homo sapiens
  ref <308>: DATABASE ACCESSION NUMBER: Refseq / NM_004027
  ref <309>: DATABASE ENTRY DATE: 2002-11-05
cgaggaccagcacctgaggccgggccgcaggccgacttcacagccaggcgcgcgcgtcgctgctgctgctgcggggctctggcgcgccagccggcgggacagcgggggctggcgggggccggggagcgccagatgatggatttggacatgcttctatgaagaaatgccacatggtccgagagcaaacatgtccaggctactcactttagtgactagggctcggtgccagcacttcccgggtaatcagacgtggtctgaccgaggatcaagaagcacatcatcaccaatgacatcatgacagcaagagagcacagccctcgccatggtgccagggcccgtgcaatgcagcgggcttccaccatcgacgtggcggccgacatgctgggcctctctctggcaggaaatatacaagacccagatgagcccattttagaatttagcttagcttgcagtgagctgcatactccatcgctagatcgaaagccaaatagttttgttgcggtgagtgtcaccacccctcctcaggcattctggacgaagcatgcacagacggagatcattgagggaaccaacaatcctatatttctaagcagtattgccttctttcaagactctcttatcaatcagatgacacaagtcaaactctccgtgtatgatgtcaaagatagatctcagggaacaatgtatttactgggctctggaacgttcattgtcaaagatctgctccaggacaggcatcataggttgcatttaacactaaggtctgcagagagtgaccgtgtaggtaacatcaccgtgattggctggcagatggaggagaagtcagaccaacggccccctgtgacccggtctgtggacactgtcaatgggaggatggttcttcctgtcgatgagagcttgacggaggcgttaggaatccgatccaaatacgcttcattgcgaaaggacactttgctgaaatcggtgttcggtggtgccatctgccgcatgtaccggtttccaaccactgatggtaaccatttgcggatcctggagcagatggcagagagcgtgctctccctgcacgtgccccggcagttcgtgaagctcctactagaggaagatgcagccagagtgtgtgagctggaggagctgggagagctgtccccttgctgggagagcctccggcgccaaattgtcacccagtaccagaccatcatcctcacataccaggagaacctgaccgacctccatcagtacagagggccctcgtttaaagcaagcagtttgaaagcagataaaaagttagaatttgttcccacaaacttgcacatacaaaggatgagagttcaagacgatggaggatcagatcagaactacgacatcgtcaccattggggcgccagcagcacactgccaaggttttaagtcaggaggtctccgcaaaaagctgcacaaatttgaagagaccaagaaacattttgaggagtgttgtacatcatctggctgccagtccataatctacataccccaggatgttgtcagagccaaggagatcatcgcccagatcaacaccctgaaaacccaagtgagttactacgcagagcggctgtcaagggcagccaaggacaggtctgccactggccttgagaggacactcgccatcttggcagacaagacacggcagctggtcacggtctgcgactgcaagctcctggccaactccatccatgggctgaacgctgcacggcctgactacattgcctccaaggcctctcccacttcgactgaggaggagcaggtgatgcttagaaatgaccaggacaccctcatggcccggtggacagggagaaacagccgatcttccctgcaggtggactggcacgaggaggagtgggagaaagtgtggctgaacgtggacaagagcctagagtgcatcattcagcgtgtggacaagctgctgcagaaggagcggctgcatggcgagggctgtgaggatgtcttcccctgtgcaggcagctgcaccagcaagaaagattgcagtccccctcctgaagagtccagcccaggtgaatggagtgaggccctttacccgctgctgaccactctcaccgactgcgtggccatgatgagtgacaaggccaagaaggccatggtattcctgctcatgcaggacagcgcgcccaccatagccacctacctgagcctgcagtaccgccgtgacgtggtcttctgccagacgctgaccgccctcatctgcggcttcatcattaagctgaggaactgcctgcatgacgacggcttcctgcgccagctctacaccatcgggctgctggcccagttcgagagcctgctgagcacctacggggaggagctggcaatgctggaggacatgagccttgggatcatggacttgaggaacgtgaccttcaaagtcactcaggccacttccagcgcctccgcagacatgctgcccgtcatcacaggaaatcgcgacgggtttaacgtgcgggtccctctgccgggcccgctgtttgacgccttgccccgggagatccagagtggcatgctgctgcgagtgcagcccgtcctcttcaacgtgggcatcaatgagcagcagacactggccgagaggtttggcgatacgtctttacaagaagtcatcaacgtggagagtttggtgcggttaaattcctactttgagcagtttaaggaagttttgcctgaggattgcctgcctcggtctcgcagtcagacgtgcctgccagagctgctgcggtttctgggtcagaacgtgcatgcccggaagaataagaacgtcgacattctctggcaagctgctgagatctgccgccgccttaatggggtccggttcaccagctgcaagagcgctaaggaccgtacagccatgtcggtgacactggagcagtgcctgatcctgcaacacgagcatggcatggccccgcaggtcttcacccaggccctggagtgcatgcgcagtgagggttgtcgaagagaaaatacaatgaagaatgttggaagtcgcaaatatgcatttaattccctgcagctgaaggctttccccaagcattacaggcctcccgaagggacttacggaaaagttgaaacgtgaacacacggtttcctctaattagctgttacataataaatgtgggtacctctagtgtcatatatgaattcttcaggagactgaaggattggtttattttgtgttcttt

SEQ ID NO: 13668 - protein, 938 aa, Homo sapiens
  ref <308>: DATABASE ACCESSION NUMBER: Refseq / NP_004018
  ref <309>: DATABASE ENTRY DATE: 2002-11-05
MTAREHSPRHGARARAMQRASTIDVAADMLGLSLAGNIQDPDEPILEFSLACSELHTPSLDRKPNSFVAVSVTTPPQAFWTKHAQTEIIEGTNNPIFLSSIAFFQDSLINQMTQVKLSVYDVKDRSQGTMYLLGSGTFIVKDLLQDRHHRLHLTLRSAESDRVGNITVIGWQMEEKSDQRPPVTRSVDTVNGRMVLPVDESLTEALGIRSKYASLRKDTLLKSVFGGAICRMYRFPTTDGNHLRILEQMAESVLSLHVPRQFVKLLLEEDAARVCELEELGELSPCWESLRRQIVTQYQTIILTYQENLTDLHQYRGPSFKASSLKADKKLEFVPTNLHIQRMRVQDDGGSDQNYDIVTIGAPAAHCQGFKSGGLRKKLHKFEETKKHFEECCTSSGCQSIIYIPQDVVRAKEIIAQINTLKTQVSYYAERLSRAAKDRSATGLERTLAILADKTRQLVTVCDCKLLANSIHGLNAARPDYIASKASPTSTEEEQVMLRNDQDTLMARWTGRNSRSSLQVDWHEEEWEKVWLNVDKSLECIIQRVDKLLQKERLHGEGCEDVFPCAGSCTSKKDCSPPPEESSPGEWSEALYPLLTTLTDCVAMMSDKAKKAMVFLLMQDSAPTIATYLSLQYRRDVVFCQTLTALICGFIIKLRNCLHDDGFLRQLYTIGLLAQFESLLSTYGEELAMLEDMSLGIMDLRNVTFKVTQATSSASADMLPVITGNRDGFNVRVPLPGPLFDALPREIQSGMLLRVQPVLFNVGINEQQTLAERFGDTSLQEVINVESLVRLNSYFEQFKEVLPEDCLPRSRSQTCLPELLRFLGQNVHARKNKNVDILWQAAEICRRLNGVRFTSCKSAKDRTAMSVTLEQCLILQHEHGMAPQVFTQALECMRSEGCRRENTMKNVGSRKYAFNSLQLKAFPKHYRPPEGTYGKVET

SEQ ID NO: 13669 - DNA, 2559 bp, Rattus norvegicus
  ref <308>: DATABASE ACCESSION NUMBER: EMBL / U27322
  ref <309>: DATABASE ENTRY DATE: 2000-03-04
ggggggggggggggggaccctctggtgggagccgagagcggtgggagcacacggcttagctgggctttccaattcctgcaggcgacgcccatggtcctggacggcaccttcaagacaacttagggaggtctactctctccagttccaaaagaaagtttggacaaagtgaatttggggtgcatttgggagatggcagctgctcccctgcttcctctgtgtcacctctcagaagcccctgcctccaacccactccaaccttcccacactgacacccagctcccagtccctctttttctttctttggtccctgagcctctctggggtcagggatgttggtcctgttcccttctcctttcattgtcctttccatctgtctgctgagctgtctcacctgtttctaccttcaccccatcgtcacccctcacctcccttctctccacctctaaacctttctctctcattccattttatctatcaaagttcttacttgcacccatacctccatccaccttcccctccttctctccctgaaattctaactatgaattctgagccttcttggactgccaccccctcccctgggggcaccctgcctgtccccaatgctaccacaccgtggctaggtagggatgaagagctagccaaggtggagatcggtatcctagctactgtcctggttctggccacaggaggcaacctggctgtacttctgactctgggccgccatggccacaagccgtcccgcatgcatctgttcgtgctgcacttggccctgaccgacctgggcgtggcgcttttccaggtactgcctcagctgctctgggacatcacctaccgcttccagggctctgacctcctctgccgggctgtcaagtatctacaggtgctcagcatgtttgcttccacttacatgctgctggccatgacactggaccggtacctggctgtctgtcaccctcttcgaagcctccggcagcccagccagtctacctaccctctcattgctgctccctggttgctggctgccatcctcagcctccctcaagttttcattttttcattgcgagaggtgatccagggctcaggggtgctggactgctgggcagatttctacttttcctggggcccgcgggcctacatcacctggaccaccatggctatctttgtgctgccggtggcggtgctcacagcttgctacggcctcatctgccacgagatctacaagaacctgaaagtcaagacccaggctggcagggaggagaggaggggctggcggacttgggataagtcctcatcttctgcagccacgagggggctaccttcccgggtcagcagcatcagtaccatctccagggcaaagatccgaaccgtgaagatgacctttgtcatcgtgctggcctacattgcttgctgggcacctttcttcagtgtccagatgtggtctgtgtgggatgagaatgcccccaatgaagattctaccaatgtggctttcaccatctccatgcttctgggcaacctcagcagctgctgcaacccctggatctacatgggcttcaacagtcgcctgttgccacgttccttgagccaccatgcctgctgcacgggctctaagccccaagtgcacaggcaactctccaccagcagcctcactagccgtcgcaccacgctgctgacccatgcctgtggttcccctactctccgactcagccttaacctcagcctccgtgcaaagcccagacctgcaggctcactgaaggatttagagcaggtggacggggaagccactatggagaccagcatcttttagagaagattccctggactctggttctgtacatctcaggcacccggaatgtggactagccggctcagggatggtaggaagtggagcttagtttgaggcagggtgaagaggccagaatgcgtgccattactctagttgtcaaggcagtgcctagtgtaggtatgggccactctctctcaattttagattgttggaaatcagagcactcaatcccccattcttgccacattcctggagtacctataaatatacccaactgggagatatagtgttctagatctgggacagcctagatggcactgccaatgcagaggctcatttcactacttggttaaccgtcctgattctaacctaactggcacatcgcagtggaacagggagaggagagaatagattattagaaagggggatgtgtatgtgggacttccatccatgccaacctgtctatagaaatgaagtggtctgatggtgatgtagaacctgatacctaggagggctgtagtaaatgctgtctctcctcatcagcctcaccacagcacaggttgtctggcaatacactgttcattctcagttgtgtggttcactgcagctgagatagggagaaaggggagagagaagaaggaataaaaatggttacagtaaagaccaccaggaataggagtaagtctgaaaggcacagggccagcgttttctctccccctcctcctgtggacccagacttctgtggggcagtgtggaacagacttcctttttga

SEQ ID NO: 13670 - protein, 425 aa, Rattus norvegicus; identical to SEQ ID NO: 995
  ref <308>: DATABASE ACCESSION NUMBER: SWISS-Prot / AAC52235
  ref <309>: DATABASE ENTRY DATE: 2001-10-16

SEQ ID NO: 13671 - DNA, 2273 bp, Homo sapiens
  ref <308>: DATABASE ACCESSION NUMBER: Refseq / NM_000707
  ref <309>: DATABASE ENTRY DATE: 2001-02-21
ctccagccgctgctcaccaggcagagcgagcgggcttggctggggcttcctgccctgagcgcgacaccgactgctccggaccgcgcctccaagcaggctgaagggcttccgctcttggcttccagaaaagtttggagaaagagaatttgaggcggattggagggtggtagcccctccccagccttctttctctcccagaagcctcactctgcacagcgtcccccattcttcccgtcctgattccccatcttcctgacccctccttctccctctcctgggtcgatcccagtcacattttctccttccgaatctcatcctccctcctcctctctatcccagtcctctgaacgatttccgcctatttggaagccttctccctgtcattctcaacgcttctcctttctctccacctcccctgccactccattttatccatcaaacctctccacttggatccacaccctcccttcatccttccctcccagcaaaccttgctcatggattctgggcctctgtgggatgccaaccccacccctcggggcaccctctctgcccccaatgccacaacaccctggctgggccgggatgaggagctggccaaggtggagatcggagtcctggccactgtcctggtgctggcgaccgggggcaacctggctgtgctgctgaccctgggccagctgggccgcaagcgctcccgcatgcacctgttcgtgctgcacttagccctgacagacctggccgtggcgctcttccaggtgctgccacagctgctgtgggacatcacctaccgcttccagggccccgacctcctgtgcagggccgtcaagtacctgcaggtgctcagcatgtttgcctccacctacatgctgctggccatgacgctggaccgctacctggctgtctgtcaccccctgcgcagcctccagcagccaggccagtccacctacctgctcatcgctgctccctggctgctggccgccatcttcagcctccctcaagtcttcattttttccctgcgggaggtgatccagggctcaggggtgctggactgctgggcagacttcggcttcccttgggggccacgggcctacctcacctggaccaccctggctatcttcgttctgccggtgaccatgctcacggcctgctacagcctcatctgccatgagatctgtaaaaacctaaaagtcaagacacaggcctggcgggtgggaggagggggctggaggacttgggacaggccctcaccttccaccttagctgccaccactcgggggctgccatctcgggtcagcagcatcaacaccatctcacgggccaagatccgaacagtgaagatgacctttgtcatcgtgctggcctacatcgcttgctgggctcccttcttcagtgtccagatgtggtccgtgtgggacaagaatgcccctgatgaagattccaccaatgtggctttcaccatctctatgcttttgggcaacctcaacagctgctgcaacccctggatctacatgggcttcaacagccacctgttaccgcggcccctgcgtcaccttgcctgctgtgggggtccccagcccaggatgcgccggcggctctccgacggcagcctctcgagccgccacaccacgctgctgacccgctccagctgcccggccaccctcagcctcagcctcagcctaaccctcagtgggaggcccaggcctgaagagtcaccaagggacttggagctggcagatggggaaggcaccgctgagaccatcatcttttaggaaagactcgctggggtctggtactgcccccaggactagtggaggttctctgcccacctcaggcactggaaatgagagctgggagggtaagggttggagttagaggaggccctgtctgaagcagagccaaaaggccagaatgggtcccctaccctggtgtcacagctgcccctagtgtgagggctgcctcataagctcccaatctcagacactggcagtcagggagaatcaaactgcctgtctccctggtcctgccatattcatagggtgtccatgcacacatggtgtcccagatctaggcaggcctaggatggtgctgtctaggggtccacgggtggcaggaattcagaggctggccttgtgccctggctacctgtctccattctaacctgactggcacatctcagcctaaccaggagaggggagaagtgaaaaaccgtgaggaggactctatttggatcctggatttgttgttgttgttgttgttgttgttagagagaa

SEQ ID NO: 13672 - protein, 424 aa, Homo sapiens; identical to SEQ ID NO: 997
  ref <308>: DATABASE ACCESSION NUMBER: Refseq / NP_000698
  ref <309>: DATABASE ENTRY DATE: 2001-02-21

SEQ ID NO: 13673 - DNA, 2561 bp, Rattus norvegicus
  ref <308>: DATABASE ACCESSION NUMBER: EMBL / U28927
  ref <309>: DATABASE ENTRY DATE: 2000-03-04
agtgtactggagatctggacagaagggccagctggagtggtggccggctgtagagatcaaaagggatctgagctataatggggttctaatcacagctctacccctgggtggtgttgtgcaagtctctgacccctgaaagcctgctctgtctgttgctttgtctgccgaagactgtgtgcaagtctctgacccctgaaagcctgctctgtctgttgctttgtctgccgaagacttggcaagctaggatctgctccctgttggctcagcccataactctgagagcagactgtcactttagatagaaatgtcatcgggagcttgggaagaaagggtctccctctccagtatggacagaaaggttacagtccatgaagatgggtgtcctgtggtctcttgggtccctgaggagggagagatgatggaccagaaagacaaggaccaggtgaaggatcgaggccaatggaccaacaagatggagttcgtactgtcagtggcgggagagatcattggcttaggcaacgtctggaggtttccctatctctgctacaagaacgggggaggagccttcttcatcccctacttcatcttcttcttcagctgtggtatcccagtgttcttcctggaggtggcactgggtcagtatagcagccaggggagtgttactgcttggaggaagatctgtccccttctccaaggcattggcatggcatctgtggtcatcgagtcttatttgaacatctactacatcatcatccttgcctgggctctcttctacctgttcagctccttcacctgggagcttccctggacaacctgcaccaactcctggaacacagaacattgcgtggactttctgaactactcatcgaccagagccgcaagctactctgagaacttcacctcaccagtcatggaattctgggagagacgggttttgggtattacatcaggcatccatgacctggggtccctgcgctgggagctggccctgtgcctcctgctcgcctggatcatctgctacttctgcatctggaagggagtcaagtccacgggcaaggttgtttacttcacagccacttttccctacctgatgctgattattcttctgatccggggtgttacccttcctggagcctaccagggcatcgtcttctacctgaagccagacttgctccgcctcaaggacccccaggtgtggatggatgcgggcacccagatcttcttttcctttgccatctgccaggggtgcctcacggccctgggcagctacaacaagtaccacaacaactgctacagggactccatcgccctctgcttcctgaacagtgccaccagcttcgtggctggttttgttgtcttctccatcctgggcttcatggctcaggagcagggcgtgcccatttctgaagtggctgagtcaggtcctggactggctttcattgccttccccaaagcagtgacgatgatgcctttgtcccagctgtggtcctgcctcttcttcctcatgctcctatttctagggctggacagccagttcgtctgtatggagtgcctggtcactgcttccatggatatgtttcctcagcagctccgaaagagaggccggcgcgagctgctgatcctcgcagttgctatcgtgtgctacttgatggggctccttctggtcactgagggtgggatgtacattttccagctctttgactactacgcctccagcggaatatgcctactcttcctctccttgtttgaggtcatctgcattggctgggtgtacggggcggatcgtttctatgacaacgtggaggacatgattggctatcggccatggcccttggtgaagatctcttggctcttcctgacccctggtctttgcctggccaccttcttcttctccttgagcaagtatacacctctcaaatacaacaatgtctacatatacccttcttggggatactccattggatggctcttggctttttcctccatggcctgtgtaccgctctttattatcatcaccctcctgaagacccagggctccttcaagaagcgccttcaaagactcatcacgccagatcccagtctgccccagccagggaggcgttcacctcaggatggctcctctgctcaaaactgttcgacctctccagtcaagcaagaactcattgcctgggagaaggagacgcatttgtagggagtgccagaggccaggtaactccagagccaggaacctggtcaaggctagctcctcccagggtgaacctctcttccaccctgttgagacctcccaggtctctggacacccctgctggtcttcgtttggctgggacagcctgtcacctaccagtcctttccagatgtgctccaggaatctgtttgccaagacttttgaactcaatgtcctgactttttggatttaaaaaaatgaagaatcagaaaggcaaagtgatattttcaaggtcatgcagccttgcagagcccaagaccttccttggacttgctgctctctgctgaggagaacctccagcctcacccctgcagcagttaacaagcctgtgtggatc

SEQ ID NO: 13674 - protein, 614 aa, Rattus norvegicus
  ref <308>: DATABASE ACCESSION NUMBER: SWISS-Prot / AAC52867
  ref <309>: DATABASE ENTRY DATE: 1998-07-15
MDRKVTVHEDGCPVVSWVPEEGEMMDQKDKDQVKDRGQWTNKMEFVLSVAGEIIGLGNVWRFPYLCYKNGGGAFFIPYFIFFFSCGIPVFFLEVALGQYSSQGSVTAWRKICPLLQGIGMASVVIESYLNIYYIIILAWALFYLFSSFTWELPWTTCTNSWNTEHCVDFLNYSSTRAASYSENFTSPVMEFWERRVLGITSGIHDLGSLRWELALCLLLAWIICYFCIWKGVKSTGKVVYFTATFPYLMLIILLIRGVTLPGAYQGIVFYLKPDLLRLKDPQVWMDAGTQIFFSFAICQGCLTALGSYNKYHNNCYRDSIALCFLNSATSFVAGFVVFSILGFMAQEQGVPISEVAESGPGLAFIAFPKAVTMMPLSQLWSCLFFLMLLFLGLDSQFVCMECLVTASMDMFPQQLRKRGRRELLILAVAIVCYLMGLLLVTEGGMYIFQLFDYYASSGICLLFLSLFEVICIGWVYGADRFYDNVEDMIGYRPWPLVKISWLFLTPGLCLATFFFSLSKYTPLKYNNVYIYPSWGYSIGWLLAFSSMACVPLFIIITLLKTQGSFKKRLQRLITPDPSLPQPGRRSPQDGSSAQNCSTSPVKQELIAWEKETHL

SEQ ID NO: 13675 - DNA, 3410 bp, Homo sapiens
  ref <308>: DATABASE ACCESSION NUMBER: EMBL / U27699
  ref <309>: DATABASE ENTRY DATE: 1999-07-02
gtaccggttcggaattcccgggtcgacccacgcgtccggaaggctacagagagagccaggttttggtgccatgcacacagggaaacttagagttcagagagggggtgtgatttgcctgacctcacacagcaagttagagacccagctccacgactcattgtcttgctgcccagagctgctggctcccctgtttactctgagctgatcgatcaccttagcacacagctggctaggagagaaccatgcagtcacttcggccacacctgcccgttgacccttgctacctcggcaggctttgatcccttctgacctggaggccagaggctaggctgaggtcactcagcagacatcaaggacctgggcagatgggccggctgggatggtggcgagctgtacagataaaaagggacatgaaaatgaaaagcccgagcctgagttttcatcacggttccactcctgagtggtcttgggtgaatcacttcatctgccaaggcctggatttcctcatctgcaaactcagaaaactaaggctttggccctcgtcatcctgcccacccagcggggcttcccaacccaccacacagccatggacgggaaggtggcagtgcaagagcgtgggcctcctgcggtctcctgggtccccgaggagggagagaagttggaccaggaagacgaggaccaggtgaaggatcggggccaatggaccaacaagatggagtttgtgctgtcagtggccggggagatcattgggctgggcaatgtctggaggtttccctatctctgctacaaaaacggaggtggagccttcttcatcccctacttcatcttcttctttgtctgcggcatcccggtgttcttcctggaggtggcgttgggccaatacaccagccaagggagtgtcacagcctggaggaagatctgccccctcttccagggcattggtctggcatctgtggtcatcgagtcatatttgaatgtctactacatcatcatccttgcctgggctctcttctacctgttcagctccttcacttctgagctgccctggacgacctgcaacaacttttggaacacagagcattgcacggactttctgaaccactcaggagccggcacagtgaccccatttgagaattttacctcacctgtcatggaattctgggagagacgagttctgggcatcacctcgggcatccatgacctgggctccctgcgctgggagctggccctgtgcctcctgctcgcctgggtcatctgctatttctgcatctggaagggggtcaagtccacaggcaaggtggtttatttcacagccacgtttccgtacctgatgcttgtcattttgctgatcagaggtgtcacccttcccggagcctaccagggcatcatctactacttgaagccagatttgttccgcctcaaggaccctcaggtgtggatggatgcgggcacccagatcttcttctcctttgccatctgccaggggtgcctgacagccctgggcagctacaacaagtatcacaacaactgctacaaggactgcatcgccctctgcttcctgaacagtgccaccagctttgtggctgggtttgttgtcttctccatcctgggcttcatgtcccaagagcaaggggtgcccatttctgaagtggccgagtcaggtcctgggctggccttcatcgccttccccaaggctgtgactatgatgcccttatcccagctgtggtcctgcctgttctttatcatgctcatattcctagggctggacagccagtttgtctgtgtggagtgcctggtgacagcctccatagacatgttccccaggcagctccggaagagcgggcggcgcgagctcctcatcctcaccatcgccgtcatgtgctacctgatagggcttttcctggtcaccgagggcgggatgtacatcttccagctgtttgactactatgcttccagtggcatatgcctgctgttcctgtcattgtttgaagtggtctgcataagctgggtgtatggggcggaccgtttctatgacaacattgaggacatgattggctaccggccatggcccctggtgaagatctcctggctcttcctgacccctggactttgcctggccactttcctcttctccttgagcaagtacacccccctcaagtacaacaacgtctatgtgtacccgccctggggatactccattggctggttcctggctctgtcctccatggtctgtgtcccactcttcgtcgtcatcaccctcctgaagactcggggtcctttcaggaagcgtctgcgtcacgtcatcacccctgactccagtctgccacagcccaagcaacatccctgcttggatggcagtgctggccggaactttgggccctccccaacaagggaaggactgatagccggggagaaggagacccatttgtagggtgtggccagagcgaggcggctcctaagccgggaacctaggtcagggccaccctccattctcagcggacagcctctgcctctgtctcctgccacaatcctgctgggaactctggagagccacaggcacccccagctggaggccagactcctctcttgtgctagctggagcagctccttcccctttgctgataacaccaccactgggacgtgccatgttgggacgccactccctgtggaaggcaccatcgtttttataaaggggggtctttttggaggccgccatctgattgcaacacctcgagttatgaggattccactgtggggatgcctcttgttagagcgtactgcatttgtacacggggagaggagctataattggaacgcacactgccgtccaatgtggagagcctgatgggacaataccctgttggaagtgacaactgaacacactgtgttggatcggaggttccgttaggggatccttccttaggcttaacgacagaggcaagcctttgcatgccgtcagtctggagtttcctccgagtctctcatggcatctccagctcctgccctagttccgcactgttcttgcagtgtttcatcaactcctggagcattggaatggaaggggcttgggagatgattcctagacttcacaaacactcggcatgcctccctgcactgtccgttcctctgcccaaggccgatattgctaactgatcacagattctttcccacctcacaatcctccgaatgtgctccaggcgacaccatttgccatcctgcttctaacgcaaacccctgacttcatggatgaggaacctggagaccaaagagacaaagggactttttcaagttcacatggggacccccttcttgggggccagagatatgactaaaaccttatctccttgtgctcaggccagtgtcttcccattaaccccctgccttagttaacaagtgtgtatggattgcca

SEQ ID NO: 13676 - protein, 614 aa, Homo sapiens
  ref <308>: DATABASE ACCESSION NUMBER: SWISS-Prot / AAA87029
  ref <309>: DATABASE ENTRY DATE: 2001-10-16
MDGKVAVQEYGPPAVSWVPEEGEKLDQEDEDQVKDRGQWTNKMEFVLSVAGEIIGLGNVWRFPYLCYKNGGGAFFIPYFIFFFVCGIPVFFLEVALGQYTSQGSVTAWRKICPLFQGIGLASVVIESYLNVYYIIILAWALFYLFSSFTSELPWTTCNNFWNTEHCTDFLNHSGAGTVTPFENFTSPVMEFWERRVLGITSGIHDLGSLRWELALCLLLAWVICYFCIWKGVKSTGKVVYFTATFPYLMLVILLIRGVTLPGAYQGIIYYLKPDLFRLKDPQVWMDAGTQIFFSFAICQGCLTALGSYNKYHNNCYKDCIALCFLNSATSFVAGFVVFSILGFMSQEQGVPISEVAESGPGLAFIAFPKAVTMMPLSQLWSCLFFIMLIFLGLDSQFVCVECLVTASIDMFPRQLRKSGRRELLILTIAVMCYLIGLFLVTEGGMYIFQLFDYYASSGICLLFLSLFEVVCISWVYGADRFYDNIEDMIGYRPWPLVKISWLFLTPGLCLATFLFSLSKYTPLKYNNVYVYPPWGYSIGWFLALSSMVCVPLFVVITLLKTRGPFRKRLRQLITPDSSLPQPKQHPCLDGSAGRNFGPSPTREGLIAGEKETHL

SEQ ID NO: 13677 - DNA, 2772 bp, Rattus norvegicus
  ref <308>: DATABASE ACCESSION NUMBER: EMBL / U30381
  ref <309>: DATABASE ENTRY DATE: 2000-03-04
ggcacgaggaaaggcgcaggggtgggagctgtcgccggagctgccacagcaaaagttctctcccctccccctcgccctcctcgccgggcccgtgggaaggtcggagctgcggccgtctgcagtcagtgaccgcgcgcctcggcgcagccgcggatagaagagaagaatcagtggcttggaaatttagccaagtgatctggcgggatgggctcatgcctgacacactttatagaggcatcggatggcacaagtgactgagaggatcctgtgagtttctggagcctgtgaaaggtagaaactcaaccatgatttctttctcaactcaacagcattcccttccttgaagtcttcagtttttacttcagcctcaggcagttatacttaagcatgaacattgacgacaaactggaaggattgtttcttaaatgtggcggcatagacgaaatgcagtcttccagggcaatggttgtaatgggtggagtgtctggccagtccgccgtgtccggagaacttcaggagtcagtacttcaagatcgaagtttgcctcaccaggagatccttgctgctgacgaagtgttacaagagagtgaaatgagacaacaggatatgatatcccatgatgaactcatggtccacgaggagacagtgaaaaatgacgaagagcagacggacacccacgagcggcttcctcaaggactgcagtatgcgcttaatgtccccataagtgtaaagcaggagattacttttactgatgtatctgagcaactgatgagagacaaaaaacaagtgagagagccagtagacttacagaaaaagaagaagcggaaacaacgctctcctgcaaaaatccttacaataaatgaggatggatcacttggtttgaaaacccctaaatctcacgtctgtgagcactgcaacgctgcctttagaacgaactatcacttacagagacatgtcttcatccatacaggcgaaaaaccgtttcaatgtagtcagtgtgacatgcgtttcatacagaagtacctgctccagagacacgagaagatccatactggtgaaaaaccatttcgctgcgatgagtgtggaatgagattcatacagaaatatcacatggaaaggcacaaaagaactcacagtggggagaagccttaccagtgtgaatactgcttacagtatttttccagaacagatcgtgtattgaaacataaacgtatgtgccatgaaaatcacgacaaaaaactaaacagatgtgccatcaaaggtggccttctgacatcagaggaagattctggcttttctacgtcaccaaaagataattcactgccaaaaaagaaaaggcaaaaacctgagaagaaatcgtccgggatggacaaggagagtgtcctggacaaatctgacacgaagaaagacagaaacgattacctgcccctctactcgtccagcactaaagtgaaggacgagtacatggtggcggagtacgctgttgaaatgccccattcctcagtgggagggtcccatttagaagacgcttctggagagatacacccacccaagttggttctcaaaaaaatcaatagtaagagaagtctgaaacagcccctggagcaaagtcaaaccatttcacccctatccacttacgaagacagcaaagtttccaagtatgcatttgagcttgtggataagcaggcattactagactcggaaggcagtgctgacatcgatcaagtggataacttgcaggaggggcccagcaaacccgtgcacagcagtactaattacgacgacgccatgcagttcctgaagaagaagcggtatctccaggctgcaagtaacaacagcagggagtacgcactgaatgtgggcaccatagcttctcagccttctgtgacacaagcagccgtggccagcgtcattgatgaaaacaccacagcatccatactagattcccaggcactgaatgtggagattaagagcaatcatgacaaaaatgttattccagatgaggtcctgcagactctgctggatcattattcccacaaagctaatggacagcatgagatttccttcagcgttgcagataccgaagtgacttctagcatatcaatcaattcttccgatgtacccgaggtcacccagtcagagaatgttggatcaagctcccaagcatcctcctcagataaagctaacatgttgcaggagtactccaagtttctgcagcaggctttggacagaactagccaaaacgatgcctatttgaacagcccgagccttaactttgtgactgacaaccagacccttccaaatccgccagcattctcttccatagacaagcaagtctatgcggccatgcccatcaatagctttcgatcaggaatgaattctccactaagaacaactccagataagtcccactttggactaatagtcggtgactcacagcacccatttcccttttcaggtgacgagacaaaccacgcctctgccacgtcaacagcagactttttggatcaagtaacttctcagaagaaagctgaggcacagcctgtccaccaggcttaccaaatgagctcctttgaacagcccttccgtgctccataccatggatccagagctggaatagcaactcaatttagcactgccaatggacaggtgaaccttcggggaccagggacaagtgctgaattttcagaattccccttggtgaatgtaaatgataatagagctgggatgacatcttcaccagatgccacaactggccagacttttggctaa

SEQ ID NO: 13678 - protein, 794 aa, Rattus norvegicus
  ref <308>: DATABASE ACCESSION NUMBER: SWISS-Prot / Q62806
  ref <309>: DATABASE ENTRY DATE: 2001-10-16
MNIDDKLEGLFLKCGGIDEMQSSRAMVVMGGVSGQSAVSGELQESVLQDRSLPHQEILAADEVLQESEMRQQDMISHDELMVHEETVKNDEEQTDTHERLPQGLQYALNVPISVKQEITFTDVSEQLMRDKKQVREPVDLQKKKKRKQRSPAKILTINEDGSLGLKTPKSHVCEHCNAAFRTNYHLQRHVFIHTGEKPFQCSQCDMRFIQKYLLQRHEKIHTGEKPFRCDECGMRFIQKYHMERHKRTHSGEKPYQCEYCLQYFSRTDRVLKHKRMCHENHDKKLNRCAIKGGLLTSEEDSGFSTSPKDNSLPKKKRQKPEKKSSGMDKESVLDKSDTKKDRNDYLPLYSSSTKVKDEYMVAEYAVEMPHSSVGGSHLEDASGEIHPPKLVLKKINSKRSLKQPLEQSQTISPLSTYEDSKVSKYAFELVDKQALLDSEGSADIDQVDNLQEGPSKPVHSSTNYDDAMQFLKKKRYLQAASNNSREYALNVGTIASQPSVTQAAVASVIDENTTASILDSQALNVEIKSNHDKNVIPDEVLQTLLDHYSHKANGQHEISFSVADTEVTSSISINSSDVPEVTQSENVGSSSQASSSDKANMLQEYSKFLQQALDRTSQNDAYLNSPSLNFVTDNQTLPNPPAFSSIDKQVYAAMPINSFRSGMNSPLRTTPDKSHFGLIVGDSQHPFPFSGDETNHASATSTADFLDQVTSQKKAEAQPVHQAYQMSSFEQPFRAPYHGSRAGIATQFSTANGQVNLRGPGTSAEFSEFPLVNVNDNRAGMTSSPDATTGQTFG

SEQ ID NO: 13679 - DNA, 2858 bp, Homo sapiens
  ref <308>: DATABASE ACCESSION NUMBER: EMBL / AF039019
  ref <309>: DATABASE ENTRY DATE: 2001-06-09
aaaggttggagctgccgccgcctgcagtcggtgaccgcgcgactcggcgcccgcccgcggaatcggatggcataagtgattaaggtggtattgaggatttctgaagcctatgaaaggtagaaactcaaccatgatttctttttcaactctacagcattcctttccttgaagtcttcgtttttaccttagtctcgggcagttatacttaagcatgaacattgacgacaaactggaaggattgtttcttaaatgtggcggcatagacgaaatgcagtcttccaggacaatggttgtaatgggtggagtgtctggccagtctactgtgtctggagagctacaggattcagtacttcaagatcgaagtatgcctcaccaggagatccttgctgcagatgaagtgttacaagaaagtgaaatgagacaacaggatatgatatcacatgatgaactcatggtccatgaggagacagtgaaaaatgatgaagagcagatggaaacacatgaaagacttcctcaaggactacagtatgcacttaatgtccctataagcgtaaagcaggaaattacttttactgatgtatctgagcaactgatgagagacaaaaaacaaatcagagagccagtagacttacagaaaaagaagaagcggaaacaacgttctcccgcaaaaatccttacaataaatgaggatggatcacttggtttgaaaacccctaaatctcacgtttgtgagcactgcaatgctgcctttagaacgaactatcacttacagagacatgtcttcattcatacaggtgaaaaaccatttcaatgtagtcaatgtgacatgcgtttcatacagaagtacctgcttcagagacatgagaagattcatactggtgaaaaaccatttcgctgtgatgaatgtggtatgagattcatacaaaaatatcatatggaaaggcataagagaactcatagtggagaaaaaccttaccagtgtgaatactgtttacagtatttttccagaacagatcgtgtattgaaacataaacgtatgtgccatgaaaatcatgacaaaaaactaaatagatgtgccatcaaaggtggccttctgacatctgaggaagattctggcttttctacatcaccaaaagacaactcactgccaaaaaagaaaaggcagaaaacggagaaaaaatcatctggaatggacaaagagagtgctttggacaaatctgacctgaaaaaagacaaaaatgattacttgcctctttattcttcaagtactaaagtaaaagatgagtatatggttgcagaatatgctgttgaaatgccacattcgtcagttgggggctcgcatttagaagatgcgtcaggagaaatacacccacctaagttagttctcaaaaaaattaatagtaagagaagtctgaaacagccactggagcaaaatcaaacaatttcacctttatccacatatgaagagagcaaagtttcaaagtatgcttttgaacttgtggataaacaggctttactggactcagaaggcaatgctgacattgatcaggttgataatttgcaggaggggcccagtaaacctgtgcatagtagtactaattatgatgatgccatgcagtttttgaagaagaagcggtatcttcaagcagcaagtaacaacagcagggaatatgcgctgaatgtgggtaccatagcttctcagccttctgtaacacaagcagctgtggcaagtgtcattgatgaaagtaccacggcatccatattagagtcacaggcactgaatgtggagattaagagtaatcatgacaaaaatgttattccagatgaggtactgcagactctgttggatcattattcccacaaagctaatggacagcatgagatatccttcagtgttgcagatactgaagtgacttctagcatatcaataaattcttcagaagtaccagaggtcaccccgtcagagaatgttggatcaagctcccaagcatcctcatcagataaagccaacatgttgcaggaatactccaagtttctgcagcaggctttggacagaactagccaaaatgatgcctatttgaatagcccgagccttaactttgtgactgataaccagaccctcccaaatcagccagcattctcttccatagacaagcaggtctatgccaccatgcccatcaatagctttcgatcaggaatgaattctccactaagaacaactccagataagtcccactttggactaatagttggtgattcacagcactcatttcccttttcaggtgatgagacaaaccatgcttctgccacatcaacacaggactttctggatcaagtgacttctcagaagaaagctgaggcccagcctgtccaccaagcttaccaaatgagctcctttgaacagcccttccgtgctccctatcatggatcaagagctggaatagctactcaatttagcactgccaatggacaggtgaaccttcggggaccagggacaagtgctgaattttcagaatttcccttggtgaatgtaaatgataatagagctgggatgacatcttcacctgatgccacaactggccagacttttggctaaaaaaaaaaaaaaagtgtaaataatactggcactttagaacagattaatcaagagtggggttactctgtgtaaatggagtgctgtacagatttaagagcaatgcgtaataacaagttaagctgatatgaatagcaagataatccaataactgcatttcgtttggttagtcagcattctttgaactgccttacatgttgtcacctttatagaagcaatgcattacttgttttagatcagaaacttgctattccacccacaccaa

SEQ ID NO: 13680 - protein, 794 aa, Homo sapiens
  ref <308>: DATABASE ACCESSION NUMBER: SWISS-Prot / Q9UQR1
  ref <309>: DATABASE ENTRY DATE: 2001-10-16
MNIDDKLEGLFLKCGGIDEMQSSRTMVVMGGVSGQSTVSGELQDSVLQDRSMPHQEILAADEVLQESEMRQQDMISHDELMVHEETVKNDEEQMETHERLPQGLQYALNVPISVKQEITFTDVSEQLMRDKKQIREPVDLQKKKKRKQRSPAKILTINEDGSLGLKTPKSHVCEHCNAAFRTNYHLQRHVFIHTGEKPFQCSQCDMRFIQKYLLQRHEKIHTGEKPFRCDECGMRFIQKYHMERHKRTHSGEKPYQCEYCLQYFSRTDRVLKHKRMCHENHDKKLNRCAIKGGLLTSEEDSGFSTSPKDNSLPKKKRQKTEKKSSGMDKESALDKSDLKKDKNDYLPLYSSSTKVKDEYMVAEYAVEMPHSSVGGSHLEDASGEIHPPKLVLKKINSKRSLKQPLEQNQTISPLSTYEESKVSKYAFELVDKQALLDSEGNADIDQVDNLQEGPSKPVHSSTNYDDAMQFLKKKRYLQAASNNSREYALNVGTIASQPSVTQAAVASVIDESTTASILESQALNVEIKSNHDKNVIPDEVLQTLLDHYSHKANGQHEISFSVADTEVTSSISINSSEVPEVTPSENVGSSSQASSSDKANMLQEYSKFLQQALDRTSQNDAYLNSPSLNFVTDNQTLPNQPAFSSIDKQVYATMPINSFRSGMNSPLRTTPDKSHFGLIVGDSQHSFPFSGDETNHASATSTQDFLDQVTSQKKAEAQPVHQAYQMSSFEQPFRAPYHGSRAGIATQFSTANGQVNLRGPGTSAEFSEFPLVNVNDNRAGMTSSPDATTGQTFG

SEQ ID NO: 13681 - DNA, 5320 bp, Rattus norvegicus
  ref <308>: DATABASE ACCESSION NUMBER: EMBL / U30813
  ref <309>: DATABASE ENTRY DATE: 2000-12-08
tttatgcctgtagttcatattaccacaaagccatatccctggcctgggctgccatcagggaccatgttgatatccaagggctgtagagaactggccctgcagcactcagaagaacaggccctgcatctcatctgggttggacaacagacctggtattgatggtgagggcagaggtgagccagctgactctgccccttgcaaactgaggcatagagtgagctagctgggtcagcattagaaaatttgccctggtggtataggtgtgacagagctggagggctgagcaactcagctaccactcaagcccaggtcaaggagtctgaggtggcccactccaatatctgtcacatttgtaaactgctggagcacatgaggaagccagtcctacagttccaaagctgcacaatctccatgacccagagcaacaacaggacatctgagaggaaccctggtgaggatccagtgttgatggtggagaagaagctagaggcctcaaaccagactcattgcaatgaatatttgcaaataaagaagtagatacaaggagtctgggggcttgaaacaaggactgggagggccaagctgcgggagggagatgccttgtcctacagggaagcctatgagggaaggcggtatccactccctcaatctagtgtcctgatgcccagcgccaacgccagccgtaagggtcaggcgaagccgcgggagatggtggatgcagcagaagattatgctaaagagagatataggatatcctctatgatacaatcacaagaaaaaccagatagagtgttggttcgcgtttaggacctgacagtaccaaaagctgaggaggttgtttgggtccgtgcaagagtccatacaagcagagcaaatggcaagcggtgcttcttagtcctgaggcagcagcagtttaatgtccaggctcttgcggctgtgggagaccatgcaagaaagcagatgatgacattttctgccaacatcaacaaagaaagtattgttgacatagaaggcattgtgagaaaagtaaatcagaatattggaagctgtacatagcaggatgttgagttgcacgtcccgaagatttacgtgattagcttaggtgataacctcacctgccttgcagctggatgatagcatttagcctgaagtggaaggagaagaggacggaagagcattaaccaagatacaagattagacaacagagtcattgaccttaggacatcaactagtcaggccaacttccgtctccagtccggcatctgccgtctcttccgagaaacattaattaacaaaggttttgtggaaatccaaactcctaaaattatttcagctgccagtgaaggaggagccaatgtttttactgtgtcctattttaaaaataatgcctacctcgctcagtctccacaactatataagcagatgtgcatttgtgctgattttgagaaggttttctgcattgggccagttttcagagttgaagactccaatacccatagatatctgactgaattcatttgtttgaatattgaaatggcctttaattatcattaccataaaattgtagaagagattgctgacactttggtgcaaatattcaaagaactccaagaaaggtttcagactgaaattcaaactgtaagtaaacagttcccatgtgagccattcaaatttttggagctaactttaagactggaggattgtgaggctttgctctgcttagagaagctgcagttgaaatggatgatgtggaagatctcagtacaccacatgaaaaactgttggctgccccacatgtggcccatacatatatagccaccaaactagataagatgaatgaaacaaagaagtacaggctgacaggaaccggatgtagatctctcctgagagacacagccagaatacagcaaatacataggcaaatgccagcagcaaaccactgaactgagaacaggacccccattgaaggtgtcttagaaaggaccgaaagagcttgaaggggctcaagaccccatatgaacaacaatgccaaccaaccagagcttccaggactaagccactacccaaagactatacatggactgaccctgggctccaacctcataagtagtaatgaatagactagtaagggtaccattagtaaggggaagcccttggtcttgccaagactgaacccccagtgaacgtgattgttagggggagggaggtaatgggaggaggatggggaggggaacacccatttagaaggggagggggaagggttagggggatgttggcctggaaactgggaaaggtaataacaaatgaagtataaataagaaatacccaatttaataaagttggagaaaaaaaaagtgtggctttaaggcgtgagtcgcttccggtcacgagggaacattgacgtctgacatacaatcctataaacagcattgtcaccctttccaaccgaatgcctccaccagcatgtaagcttttattttctccacttcaattccatggtgtaaagctctctctgtaagcaactgaggatgatgtattctttgtgctctagacaatatttcttctcctctcatgaacatatcataagagttggatttcttgggtcaggcatgctatagaaaggtcttacagtcaatagatatttatcaagaacataaaagtctgtatcatacttttccttcaccaaacgacccaacagtttttcttttgcttttcttctttatctttttttcatctttattaaattgggggtatttcttatttgcatatcaaatgttattccctttcccagtatccaggccaacatcccctaacccctccacctccccttctagatgggtgttcccctacccatcctccctccattaccgccctccccccaacaatcacgttcattgggggttcagtcttggcaggaccccttccactggtgctcttactagtctattcattgctacgtatgcagttggagtccagggtcagtccatgtatagtctttgggtagtggcttagtccctggaagctctggttggttggcattgttgttcatatggggtttcaagccccttcaagctcttttagtcctttctaagattccttcaacagggatcccgttctcagttcactggtttaattatggcattcgcctatgtatttgctgtattctggctgtgtctctcaggagagatctacatccggttcctgtcagcctgcatttctttgcttcatccatcttgtctaattgggtggctgtatatgtatgggccacatgtggggcaggctctgaaagggtgttccttcttcctctgttctaaactttgcctccctattccctcccaagggtattcttgttccccttttaaagaagaagtgaagcatttgcattttggtcatccttcttgagtttcacctgttctgtgcatctagggtaatttgagcatttggctaatagccacttatcaatgagtgcataccatgtgtgtttttctgtgattgggttacctcactcaggatgacattttccagttccatccatttgcctatgaatttcataaagtcattgtttttgatagctgagtagtattccattgtgtagacgtaccatattttctgtatccattcctctgttgaagggcatcagggttctttacaccttctggctattataaataaggctgctatgaacatagtggagcatgtgtctttgttacatgttggagcatcttttgggtatatacccaagagaggtatagctgggtcctcaggtagttcaatgtccaattttctgaggaaccgccagaatgatttccagaatggctgtaccagtctgcaatcccaccaaaaatggaggagtgttcctctttcttcacatccttgccagcatctattgtcacctgagttttttatcttagccattcttactggtatgaggtgaaatctcagggttgttttgatttgcatttcccttatgactaaagatgttgaacatttcattaggtgcttctcagccattcggcattcctcagctgtgaattctttgtttagctctgaaccccattttttaatagggttatttttctccctgccgtctaacttcatgagttctttgtatattttggatataagccctctatcatttgtgagattggtaaagatcttttcccaatctgttggttgccgttttgtcctaacaacagtgtcctttgccttacaatagctttgcagttttatgagatcccatttgttgattcttgatcttagagcataagccattggtgttttgttcaggaaattttttccagtgcccatgtgttcgagatgcttccccactttttcttctattagttcaagtgtatctggtttgatttggaggtccttgatccacttgaacttaagctttgtacagggtgataagcatggatcgatctgcactcttctacataaagccacactttttattctctctagtaacctgctattgattaggctatacctgaggtacttaagatatgcagtagaattaagtattactaaaagtgccacaattattttttaagtagctcagtaaaaattaatttaagtcaaaatgttttagaacttcagatatgctttaaataggaaatacttgaacattttaatgagaatttctatggttgaaattcatagtctatcactataggaaatgttaaggaaaatttaaacagtttaggattatataatttttttcctttctatattgtggtgaccaccatacaaatatcataaattttcaatatttgaacttttaactcttgacattgagaaaaatggagaaattaccaagattttaacatttataaaactggtatgtcttaaaagttactttcagaaatcatgtgaagtatctgaaaacactggctagaaacagtaatactgaaaccttgttattaattctgagcctgaaattcaataaaacttaaagctaaaaaaaaagaaagatgtatatacaaaagggcatactgtgtgacatactgggaccctttactgcttccatgatgagatcgttttaaaaaaatttttagtatttattttctttacaggggttgcaaaagcagaggggtggatacaaagggatgggaagatgagtgggttgcagtacatgattgtagggagccatattggatttggccctagccgctttttgactgcatggctcaaagtggcttaggtgactctgggctgtttggccaccgatattcacccctaagatgactgccataagtcttaagattgttggacagaggcctctcccatgaatttacggcacaggaagataacattc

SEQ ID NO: 13682 - DNA, 2925 bp, Rattus norvegicus
  ref <308>: DATABASE ACCESSION NUMBER: EMBL / U32498
  ref <309>: DATABASE ENTRY DATE: 2000-03-04
atggcggcagaagcagctggtgggaaatacaggagcacagtcagcaaaagcaaagacccctcggggctgctcatctcggtgatcaggactctgtctaccagtgatgatgttgaagaccgagaaaatgagaaaggtcgccttgaagaagcctatgagaagtgtgaccgtgacctggatgaattgatcgttcagcactacacagaattgacaacagccattcgcacataccagagcatcacagaacgcatcactaactccaggaataaaatcaagcaggtaaaagagaacctgctttcctgcaagatgctgttgcattgcaaacgggatgagcttcgtaaactatggattgaaggaattgagcataagcatgtcctgaaccttctggatgagattgaaaacatcaagcaagtgcctcaaaagctggaacagtgcatggccagcaagcactacctcagcgccacggacatgctggtgtcagcagtggagtctctggagggtccgctgctccaggtggaaggactcagtgacctcaggctggaacttcacagcaagaagatgaacctgcacttggttctcatagaggaactgcaccgacatctgtacatcaaatccactagccgggttgtacagcgtaacaaggaaaaagggaagatgagttctcatggcaaagatgcttctcctggtcctctgattgatgtttcaaacatctctactccacgcaaattccttgatgccactcaatattctgctgctggaagctcaagtgtgagggagatgaacctgcaggacatcaaagaggacttggactgtgatcctgaggagaacagcactcttttcatgggaattcttattcaggggctggccagactgaagaagatccctgagaccgttaaagccattaaagagcgtttggagcaggagctaaagcagattgtgaagaggtcaaccacccaggtggcagacagtgcctatcagaggggagagagcctcactgtggacaaccagccaaggttacttctagaactgctggaactgttgtttgataagtttaatgctgtagccagtgcacattctatagtcctggggtaccttcaggactctgtggggacccagccaacacagcaggaagagatcaaattatacgatatggcagatgtgtgggtgaagatccaggatgtgctgcagatgctgttgactgaatacttggatatgaagaacacacgtactgcgtcagagccgtcagctcaactaagctatgccagtactggacgagagttcgcagccttttttgccaagaagaaaccacaaaggccaaagaattctcttttcaagtttgaatcatcctcccatgctatcagtatgagcgcctatctccgagaacagagaagggagctgtacagtcggagtggagaacttcaaggaggtcctgatgacaacttaattgaaggtggaggaacaaaatttgtctgcaaacctggagccagaaatattaccgtcatattccatccactgctgagatttattcaggagattgagcatgccctgggacttggccctgccaaacagtgtctccttcgagagtttctcactatatatatcaagaacatcttccttaatcaggtcttgactgagatcaacaaggagatcgaaggtgtcaccaaaacctcagaccccttgaagatcctagctaatgcagacaccatgaaggttctgggcgtgcagaggcctcttctacagagcaccatcatcgtggagaagacagtacaagacctcatgaacctgatgcatgacttgagtgcatattcagatcagttcctcaacatggtgtgtgtgaagctacaggaatacaaggacacatgctccacagcctacagaggcattgtccaatcagaagagaaacttgtcatcagtgcatcttgggcaaaagatgatgatatcagcagactcttgaaatcactgccgaactggactaacatggctcagcccaaacagctaaggcctaagagagaggaggaggaagacttcataagggcagcctttggcaaggagtctgaggttctgattggaaaccttggtgacaaactcattcctccacaagatattctccgtgacgtcagtgacctcaaagccttggccaacatgcatgaaagcctggaatggctggcaggccgaacaaagtcagctttctccagcctttctgcatcccagatgctttcccctgctcaagagagccacgtaaacatggaccttcctccagtgtctgaacagatcatgcagacgctgagtgaacttgccaagtccttccaggacatggctgaccgctgcttgctcgtcttgcatctggaagtgagagttcattgtttccactatctcatccctctggcaaaggaggggaactatgccattgtggccaatgtggaaagcatggattatgaccctttagtggtcaagctcaacaaagacatcagtgccatggaagaggccatgagcgccagcctccagcaacacaagttccagtacatcttcgaaggtctgggacacctcatctcctgtatcctcattaatggggctcagtacttccggcgcatcagtgagtctggcatcaagaaaatgtgtagaaacatttttgttcttcagcagaatttgaccaacatcaccatgtcacgggaggcagacttggactttgcaagacagtactacgagatgctgtacaacactgctgatgagctcctgaacctggtggtggaccagggtgtgaaatacacagagctagagtacatccatgccctgaccctgctgcaccgaagccagactggcgtgggggaccagaccacccagaacaccaggctgcagagactcaaggagatcatctgtgagcaggctgccatcaagcaagccaccaaggacaagaaaataaccactgtg

SEQ ID NO: 13683 - protein, 975 aa, Rattus norvegicus
  ref <308>: DATABASE ACCESSION NUMBER: SWISS-Prot / AAC52265
  ref <309>: DATABASE ENTRY DATE: 2002-06-15
MAAEAAGGKYRSTVSKSKDPSGLLISVIRTLSTSDDVEDRENEKGRLEEAYEKCDRDLDELIVQHYTELTTAIRTYQSITERITNSRNKIKQVKENLLSCKMLLHCKRDELRKLWIEGIEHKHVLNLLDEIENIKQVPQKLEQCMASKHYLSATDMLVSAVESLEGPLLQVEGLSDLRLELHSKKMNLHLVLIEELHRHLYIKSTSRVVQRNKEKGKMSSHGKDASPGPLIDVSNISTPRKFLDATQYSAAGSSSVREMNLQDIKEDLDCDPEENSTLFMGILIQGLARLKKIPETVKAIKERLEQELKQIVKRSTTQVADSAYQRGESLTVDNQPRLLLELLELLFDKFNAVASAHSIVLGYLQDSVGTQPTQQEEIKLYDMADVWVKIQDVLQMLLTEYLDMKNTRTASEPSAQLSYASTGREFAAFFAKKKPQRPKNSLFKFESSSHAISMSAYLREQRRELYSRSGELQGGPDDNLIEGGGTKFVCKPGARNITVIFHPLLRFIQEIEHALGLGPAKQCLLREFLTIYIKNIFLNQVLTEINKEIEGVTKTSDPLKILANADTMKVLGVQRPLLQSTIIVEKTVQDLMNLMHDLSAYSDQFLNMVCVKLQEYKDTCSTAYRGIVQSEEKLVISASWAKDDDISRLLKSLPNWTNMAQPKQLRPKREEEEDFIRAAFGKESEVLIGNLGDKLIPPQDILRDVSDLKALANMHESLEWLAGRTKSAFSSLSASQMLSPAQESHVNMDLPPVSEQIMQTLSELAKSFQDMADRCLLVLHLEVRVHCFHYLIPLAKEGNYAIVANVESMDYDPLVVKLNKDISAMEEAMSASLQQHKFQYIFEGLGHLISCILINGAQYFRRISESGIKKMCRNIFVLQQNLTNITMSREADLDFARQYYEMLYNTADELLNLVVDQGVKYTELEYIHALTLLHRSQTGVGDQTTQNTRLQRLKEIICEQAAIKQATKDKKITTV

SEQ ID NO: 13684 - DNA, 4218 bp, Homo sapiens
  ref <308>: DATABASE ACCESSION NUMBER: Refseq / NM_021807
  ref <309>: DATABASE ENTRY DATE: 2001-07-14
gggggagcctagcggctctccccgcgtccaagatggcggcagaagcagctggtgggaaatacagaagcacagtcagcaaaagcaaagacccctcggggctgctcatctctgtgatcaggactctgtctactagtgacgatgtcgaagacagggaaaatgaaaagggtcgccttgaagaagcctacgagaaatgtgaccgtgacctggatgaattgattgtacagcactacacagaattgacgacagccattcgcacataccagagcatcacagagcgcatcactaactcccgaaataaaataaagcaggtaaaagagaacctgctttcatgcaagatgctgctgcactgcaaacgggatgagcttcggaaactgtggattgaaggaattgagcataagcatgtcctgaacttgttggatgaaattgagaatatcaagcaagtgcctcaaaagctggaacagtgcatggccagcaagcactatctcagtgccactgacatgttggtgtcagcagttgagtctttggagggccccctgctccaggtggaaggactgagtgaccttcgactagagcttcacagcaagaagatgaaccttcacttggttctcatagatgaactacaccggcacctgtacatcaaatcgactagccgagttgtgcagcgtaacaaggaaaaagggaaaatcagctccctcgtgaaagatgcttctgttcctctgattgatgttacaaacctccctactcctcgaaaattccttgatacctctcactattctactgctggaagctcaagtgtgagggagataaatctgcaggacatcaaggaagatttagaattggatccagaggaaaacagcaccctgtttatgggtatcctcattaagggcttggcgaaactgaagaagatcccagaaacagttaaggcaatcatagagcgcttggagcaggagttgaagcaaattgtgaagaggtctacaacccaggtggcagacagtggctatcagcggggggagaacgttactgtggagaaccaaccaaggttgcttctagaactgctggagttactgtttgacaagtttaatgctgtagccgctgcacactctgtggtcctgggatacctgcaggacactgtagtgactccactgactcagcaggaagatatcaaactgtatgatatggcagatgtatgggtgaagatccaagatgttctacagatgctattaactgagtacttggatatgaaaaatactcgtacggcctctgaaccatcagctcaactaagctatgccagcactggacgagagtttgcagccttttttgccaagaagaaacctcaaaggccaaaaaattctcttttcaagttcgaatcgtcctcccatgccatcagtatgagcgcctatctgcgagaacagagaagggagctctatagtcggagtggagaactgcaagggggtcctgatgacaacttaattgaaggtggaggaacaaaatttgtctgcaaacctggagccagaaacattaccgtcatattccacccattactaagatttattcaggagattgagcatgctctgggtcttggcccagccaaacagtgtcctcttcgagagtttctcaccgtgtacatcaaaaacatctttctcaatcaagtcttggctgagatcaacaaggagattgaaggagtcactaaaacatctgaccctttgaagattctggccaacgcagacaccatgaaggtgctgggagtgcagcggcctctcctacagagcacaatcattgtggagaagacagttcaagacctcctgaacctgatgcatgacttgagtgcatattcagatcaattcctcaacatggtgtgcgtaaagctccaggagtacaaggacacctgcactgcagcttacaggggtattgtccagtcagaagaaaaacttgtcatcagtgcatcctgggcaaaagatgatgatatcagcagactcttgaaatctctaccaaactggatgaatatggctcaacccaaacagctgaggccaaaaagagaggaggaagaagatttcataagggcagcttttggcaaggagtctgaagttcttattgggaacctgggtgataaattaatccctccacaagacatccttcgtgacgtcagtgacctcaaagccttggccaacatgcatgaaagcctggaatggttggcaagtcgaacaaagtcagctttctccaatctttctacatcccagatgctttctcctgctcaagacagccacacgaacacggatctccccccagtgtcagagcagatcatgcagactctcagtgaacttgccaaatcgttccaggatatggctgaccgctgcttgcttgtcttacatctggaagtgagggttcactgtttccactatcttatccctcttgcaaaggaggggaactatgccattgtggctaatgtggaaagtatggattatgaccccctggtggtcaagctcaacaaagatatcagcgccattgaagaggccatgagcgccagccttcagcagcacaagttccagtatatcttcgaaggcctgggccacctgatctcctgcatcctcattaatggtgcccagtacttcaggcgcatcagtgagtctggcatcaagaaaatgtgtaggaacatttttgttcttcagcagaatttgaccaacatcaccatgtcgcgggaggcagacctggactttgcaaggcagtactacgagatgctttacaacacagctgacgagctcctgaacctggtggtggaccagggtgtgaagtacacggagctggagtacatccacgctctgaccctgctgcaccgcagccaaactggggtgggggaactgaccacccagaacacgaggctgcagaggctcaaagagatcatctgcgagcaggctgccatcaagcaagccaccaaggacaagaagataactaccgtttagcagggcgtactgcggttggtgacgggggtcccctcagtcacactcacttttttccttggtatgttattgagtatattctgagcttagttttctctacagtgatactttagtggagaggaggtgtaaggattctttctctctggttttggcttttcatataaatgctaaaggaaggcgacagtacagagtgttttggttgaacaactactttaatgcagtcaaatctaacgggactagggtgggatagggaggaaggtggtatcaaattgttggactctgaaaaacaagtggatggattactaatatttgatttattactcaatatatatataattccagccttggaaagtaggaaagtaggctgctacctaacttttagtcccttccaaaaccatttagtagggttctattacataaacagtagggtttttcctctcctgaccttatccgtttacagttcaatgaaataagtgtatgtgcattgctgtctgtctctattgccaaaatcaaataaatggcttctcagctgctgtttacaacaaacttccctaaccaaaacagaacctctaatttagggctaggaatagaagtcttttgatcccagtccgtgggacagttttgtatgctgtatcttgtacacaggttgtaggttggtttattgccattttgttttatttctgctatataaaaaccaagagccagacaattagacaactatggaggaatgaaaggcaattcaaacatctgcttgattcccgccccgccacccctaatttctgagagaataatggttagagaacattgcatctcacttgaaacatcctttgggggtaaatgattcttaggtgctcacttggtctgagctcagctgaatgcagggaagatgggacagagtgacatttctcctctgtgcggcctccagctgagcctgtctctgaattgttccctcccccgcaatgtgggcacttaccatgttcctggcacactggacctcaccatgtcccccggtcaccagtcctcttgctgcccatggttcataggtcatagaaggcagcaatgcactgactgggccacatcttgaaaactcgtggaaagggaaaggggaggagatgggactttgaccacacacagtgatgcctcacaccctgaaggtgggggattttgtacctgtttgtacaactttggtcttgatgggaaaaatggagaattaaaaagtgttttgagaagcttataaaaaaaaaaaaaaaaaaaaaaaaaaaaa

SEQ ID NO: 13685 - protein, 974 aa, Homo sapiens [sequence omitted]

SEQ ID NO: 13686 - DNA, 1681 bp, Rattus norvegicus
  ref <308>: DATABASE ACCESSION NUMBER: EMBL / U33287
  ref <309>: DATABASE ENTRY DATE: 2000-03-04
gaattccgcgcaggaccaaggaggtgagatcagcctctttgttccctaaccaagcttagcagcgtctccaagaaccttccatctgtcttccatgatctccgttctggggactgagaaacaagactcttcccaaatgaagaggatttacctgctcgtggtggggctttatctgctgtcctttagcagggcagaagaggggctgaacttccccacgtacgatgggaaggaccgagtggtcagcctttctgagaagaacttgaagcaagtgttgaagagatacgatttgctctgtctctactaccacgagcctgtgtcttcagacaaggtcgcacagaagcagttccaactgaaggagatcgtactggagcttgtggcccaggttctggaacataaaaacataggctttgtgatggtggattcaaggaaagaggccaagcttgccaagaggctgggcttcagtgaagaaggaagcctgtatgttctgaagggtggtcgcaccattgagtttgacggggaatttgcagcagatgtcttggtggaatttctcttggacctcattgaggacccagtagagatcgtgaacaacaagttggaagtccaagcctttgagcgcatcgaggaccagatcaagctgcttggctttttcaagaatgaggactcagaatattacaaagcgttccaagaggcagctgaacacttccagccttacatcaagttctttgccacctttgacaagggggtggcaaagaagttgttccttgaagtgaatgaagttggcttctatgagccatttatggatgaacccagtgtcatccctaacaagccctacacagaagaggagcttgtggagtttgtgaaggagcatcaaagacccaccctacgtccgttgcgcccagaggacatgtttgaaacatgggaagacgacttgaatggaatccacattgtggcatttgcggagaagagtgacccagatggctatgagttcctggagatcctaaaacaggttgcccgggacaacactgacaaccctgacttgagcatcttgtggattgacccagacgactttcctctgcttgttgcttactgggagaagactttcaagattgacctgttcaagccacagattggggtggtgaatgtaaccgatgctgacagtgtctggatggagatcccagatgatgacgacctgcccacagctgaggagctggaagactggattgaggatgtgctttctggaaagatcaatactgaagacgatgacaatgaagatgaagatgatgatggcgataatgacaatgacgatgacgatgacgacgatgataattctgatgaggataatgatgacagtgatgatgacgatgatgacgatgaataactccagccccgggtacttctgatgagagtgacatcacaaccaccccgtaccccattacagacagcccaaggggcagcaagcagtggtgcccacacctagtcagctctttttccttctccagcatcttttccaagtccgttcttggcaggagcagtacatttccgtgaatgcctttccaaacccagctgtcccactctgcagggacagaagggggaggggggcggtgattcccatgctgactccttttaactattgaggaacaaacagctcttgttctttgttagataatcaggggtcatggaattc

SEQ ID NO: 13687 - protein, 413 aa, Rattus norvegicus; identical to SEQ ID NO: 13040
  ref <308>: DATABASE ACCESSION NUMBER: SWISS-Prot / P51868
  ref <309>: DATABASE ENTRY DATE: 2002-06-15

SEQ ID NO: 13688 - DNA, 2528 bp, Homo sapiens
  ref <308>: DATABASE ACCESSION NUMBER: EMBL / D55655
  ref <309>: DATABASE ENTRY DATE: 1997-11-23
aaaaatcagcctgtctgctctctccttgctcaacaaggcctctaacagtcttctgtcctctattctgcacacggcatatttgggaacgagaaacccaaagttttcccaaatgaagagaactcacttgtttattgtggggatttattttctgtcctcttgcagggcagaagaggggcttaatttccccacatatgatgggaaggaccgagtggtaagtctttccgagaagaacttcaagcaggttttaaagaaatatgacttgctttgcctctactaccatgagccggtgtcttcagataaggtcacgccaaaacagttccaactgaaagaaatcgtgcttgagcttgtggcccaggtccttgaacataaagctataggctttgtgatggtggatgccaagaaagaagccaagcttgccaagaaactgggttttgatgaagaaggaagcctgtatattcttaagggtgatcgcacaatagagtttgatggcgagtttgcagctgatgtcttggtggagttcctcttggatctaattgaagacccagtggagatcatcagcagcaaactggaagtccaagccttcgaacgcattgaagactacatcaaactcattggctttttcaagagtgaggactcagaatactacaaggcttttgaagaagcagctgaacacttccagccttacatcaaattctttgccacctttgacaaaggggttgcaaagaaattatctttgaagatgaatgaggttgacttctatgagccatttatggatgagcccattgccatccccaacaaaccttacacagaagaggagctggtggagtttgtgaaggaacaccaaagacccactctacgtcgcctgcgcccagaagaaatgtttgaaacatgggaagatgatttgaatgggatccacattgtggcctttgcagagaagagtgatccagatggctacgaattcctggagatcctgaaacaggttgcccgggacaatactgacaaccccgatctgagcatcctgtggatcgacccggacgactttcctctgctcgttgcctactgggagaagactttcaagattgacctattcaggccacagattggggtggtgaatgtcacagatgctgacagtgtctggatggagattccagatgatgacgatcttccaactgctgaggagctggaggactggattgaggatgtgctttctggaaagataaacactgaagatgatgatgaagatgatgatgatgatgataattctgatgaagaggataatgatgacagtgatgacgatgatgatgaatagcccaactccaaacaattctgatgaaaacaaaatcacagcacccactaccatacagacagcacaaggtggcagcaagcaattctgccccacacccagccagctcctttcccttttccatcatctcttttcccactccctttgcgtcaggagcagcatcattcagcaaatgccttttcaaatgcagcaatcccacttagcagggacaggagaaaaattattcccatgttgactgtcttgactgtcacggaacagatcttgttctttgctggaccatcaagggtcatggcagtgcctgaacatggcagtctagggtgaacaatcccctaacacaagtttacttgtctttgattatgacagtaacaaaattgacagctttctaactcacaggcatagagtgaccttttaatcagagcccagggaagacacatgattaatgatttagctccctccatacctcgaacatcagttgggatccctcctccagccaagatgatccttcttagagaaggctcagccttggaagcaaacttataaatcatattctcatggctttgttaaacttatttcaagtgatggtcattcatatcactatgaacttggatattcaagcctttggatggctatggagagggcttgaaatgtgtacaggtgtcaccatcatttctagtatattaggaaactgggatgggaggttgatttgctctctaaacttccctctagttggcaagtctcacatattcatcagcaggagtggagggtgggggaaaactagaaagatgaaaacttttacatttttctgatgggttcatgtctctgattgggtcagctggcttcctagcctaagctgggatctgaataccccttctctgtagctgctagtgagccttcccatttagattaaagattgctttatccagcagtcaattaactctccagttatcagtactcccacaattggccagggcaacaataattggagttcatactgatgccctgaggcactgaaaaaaaaaaaaatcccaaagtgccttctgagctgtctaaaagttacattgtgcttggtagatttagtgttaagtgtgcagtataattttctaatttattttctcaatcttttagcacatgtgtaagacactgtgcaaatttttggaaaatagagcaatactttttgtggaatactagctaactaattctgtcattaaactcatattttggaaat

SEQ ID NO: 13689 - protein, 399 aa, Homo sapiens
  ref <308>: DATABASE ACCESSION NUMBER: SWISS-Prot / O14958
  ref <309>: DATABASE ENTRY DATE: 2002-06-15
MKRTHLFIVGIYFLSSCRAEEGLNFPTYDGKDRVVSLSEKNFKQVLKKYDLLCLYYHEPVSSDKVTPKQFQLKEIVLELVAQVLEHKAIGFVMVDAKKEAKLAKKLGFDEEGSLYILKGDRTIEFDGEFAADVLVEFLLDLIEDPVEIISSKLEVQAFERIEDYIKLIGFFKSEDSEYYKAFEEAAEHFQPYIKFFATFDKGVAKKLSLKMNEVDFYEPFMDEPIAIPNKPYTEEELVEFVKEHQRPTLRRLRPEEMFETWEDDLNGIHIVAFAEKSDPDGYEFLEILKQVARDNTDNPDLSILWIDPDDFPLLVAYWEKTFKIDLFRPQIGVVNVTDADSVWMEIPDDDDLPTAEELEDWIEDVLSGKINTEDDDEDDDDDDNSDEEDNDDSDDDDDE

SEQ ID NO: 13690 - DNA, 3269 bp, Rattus norvegicus; identical to SEQ ID NO: 8427
  ref <308>: DATABASE ACCESSION NUMBER: EMBL / U35244
  ref <309>: DATABASE ENTRY DATE: 2000-03-04

SEQ ID NO: 13691 - protein, 597 aa, Rattus norvegicus; identical to SEQ ID NO: 8428
  ref <308>: DATABASE ACCESSION NUMBER: SWISS-Prot / AAC52985
  ref <309>: DATABASE ENTRY DATE: 2002-06-15

SEQ ID NO: 13692 - DNA, 2536 bp, Homo sapiens; identical to SEQ ID NO: 8429
  ref <308>: DATABASE ACCESSION NUMBER: Refseq / NM_022916
  ref <309>: DATABASE ENTRY DATE: 2002-02-15

SEQ ID NO: 13693 - protein, 596 aa, Homo sapiens; identical to SEQ ID NO: 8430
  ref <308>: DATABASE ACCESSION NUMBER: Refseq / NP_075067
  ref <309>: DATABASE ENTRY DATE: 2002-02-15

SEQ ID NO: 13694 - DNA, 3269 bp, Rattus norvegicus; identical to SEQ ID NO: 8427
  ref <308>: DATABASE ACCESSION NUMBER: EMBL / U35244
  ref <309>: DATABASE ENTRY DATE: 2000-03-04

SEQ ID NO: 13695 - protein, 597 aa, Rattus norvegicus; identical to SEQ ID NO: 8428
  ref <308>: DATABASE ACCESSION NUMBER: SWISS-Prot / AAC52985
  ref <309>: DATABASE ENTRY DATE: 2002-06-15

SEQ ID NO: 13696 - DNA, 2536 bp, Homo sapiens; identical to SEQ ID NO: 8429
  ref <308>: DATABASE ACCESSION NUMBER: Refseq / NM_022916
  ref <309>: DATABASE ENTRY DATE: 2002-02-15

SEQ ID NO: 13697 - protein, 596 aa, Homo sapiens; identical to SEQ ID NO: 8430
  ref <308>: DATABASE ACCESSION NUMBER: Refseq / NP_075067
  ref <309>: DATABASE ENTRY DATE: 2002-02-15

SEQ ID NO: 13698 - DNA, 2051 bp, Rattus norvegicus; identical to SEQ ID NO: 8435
  ref <308>: DATABASE ACCESSION NUMBER: EMBL / U35245
  ref <309>: DATABASE ENTRY DATE: 2000-03-04

SEQ ID NO: 13699 - protein, 617 aa, Rattus norvegicus; identical to SEQ ID NO: 8436
  ref <308>: DATABASE ACCESSION NUMBER: SWISS-Prot / AAC52986
  ref <309>: DATABASE ENTRY DATE: 2002-06-15

SEQ ID NO: 13700 - DNA, 2511 bp, Homo sapiens
  ref <308>: DATABASE ACCESSION NUMBER: EMBL / AF308803
  ref <309>: DATABASE ENTRY DATE: 2001-03-19
agtttttctggtagaaggcggggttctcctcgtacgctgcggagtctctgcggggtgtagaccggaatcctgctgacgggcagagtggatcagggagggagggtcgagacacggtggctgcaggtctgagacaaggctgctccgaggtagtagctctcttgcctggaggtggccattcattcctggagtgctgctgaggagcgagggcccatctggggtctctggaagtcggtgcccaggcctgaaggatagccccccttgcgcttccctgggctgcggccggccttctcagaacgaagggcgtccttccaccccgcggcgcaggtgaccgctgccatggcttttccccatcggccggacgcccctgagctgcctgacttctccatgctgaagaggctggctcgagaccagctcatctatctgctggagcagcttcctggaaaaaaggatttattcattgaggcagatctcatgagccctttggatcgaattgccaatgtctccatcctgaagcaacacgaagtagacaagctatacaaggtggagaacaagccagccctcagctccaatgaacaattgtgcttcttggtcagaccccgcatcaagaatatgcgatacattgccagtcttgtcaatgctgacaaattggctggccgaactcgcaaatacaaagtgatcttcagccctcaaaagttctatgcgtgtgagatggtgcttgaggaagagggaatctatggagatgtgagctgtgatgaatgggccttctctttgctgcctcttgatgtggatctgctgagcatggaactaccagaatttttcagggattactttctggaaggagatcagcgttggatcaacactgtagctcaggccttacaccttctcagcactctctatggaccctttccaaactgctatggaattggcaggtgcgccaagatggcatatgaattgtggaggaacctggaggaggaggaggatggcgaaaccaagggccgaaggccagagattggacatatctttctcttggacagagatgtggactttgtgacagcactttgctcccaagtggtttatgagggcctagtagatgacaccttccgcatcaagtgtgggagtgtcgactttggcccagaagtcacatcctctgacaagagcctgaaggtgctactcaatgccgaggacaaggtgtttaatgagattcggaacgagcacttctccaatgtctttggcttcttgagccagaaggcccggaacttgcaggcccagtatgatcgccggagaggcatggacattaagcagatgaagaatttcgtgtcccaggagctcaagggcctgaaacaggagcaccgcctgctgagtctccatattggggcctgtgaatccatcatgaagaagaaaaccaagcaggatttccaggagctaatcaagactgagcatgcactgctagaggggttcaacatccgggagagcaccagctacattgaggaacacatagaccggcaggtgtcgcctatagaaagcctgcgcctcatgtgccttttgtccatcactgagaatggtttgatccccaaggattaccgatctctgaaaacacagtatctgcagagctatggccctgagcacctgctaaccttctccaatctgcgaagagctgggctcctaacggagcaggcccccggggacaccctcacagccgtggagagtaaagtgagcaagctggtgaccgacaaggctgcaggaaagattactgatgccttcagttctctggccaagaggagcaattttcgtgccatcagcaaaaagctgaatttgatcccacgtgtggacggcgagtatgatctgaaagtgccccgagacatggcttacgtcttcagtggtgcttatgtgcccctgagctgccgaatcattgagcaggtgctagagcggcgaagctggcagggccttgatgaggtggtacggctgctcaactgcagtgactttgcattcacagatatgactaaggaagacaaggcttccagtgagtccctgcgcctcatcttggtggtgttcttgggtggttgtacattctctgagatctcagccctccggttcctgggcagagagaaaggctacaggttcattttcctgacgacagcagtcacaaacagcgctcgccttatggaggccatgagtgaggtgaaagcctgatgtttttcccggccagtgttgacatcttccctgaacacattcctcagtgagatgcaggcatctggcacccagctgctataaccaagtgtccaccaactacctgctaagagccgggagcatggaacgtgttgggatttagagaacattatctgagaaaagagttcacttcctgctcccaggatatttctcttttctgtttatgaagtacaacccatgctgctaagatgcgagcaggaagaggcatcctttgctaaatcctgtttgaatgtcattgtaaataaagcctctgctctcagatgtaaaaaaaaaaaaaaaaaaaaa

SEQ ID NO: 13701 - protein, 617 aa, Homo sapiens; identical to SEQ ID NO: 8438
  ref <308>: DATABASE ACCESSION NUMBER: SWISS-Prot / AAG34680
  ref <309>: DATABASE ENTRY DATE: 2002-06-15

SEQ ID NO: 13702 - DNA, 2051 bp, Rattus norvegicus; identical to SEQ ID NO: 8435
  ref <308>: DATABASE ACCESSION NUMBER: EMBL / U35245
  ref <309>: DATABASE ENTRY DATE: 2000-03-04

SEQ ID NO: 13703 - protein, 617 aa, Rattus norvegicus; identical to SEQ ID NO: 8436
  ref <308>: DATABASE ACCESSION NUMBER: SWISS-Prot / AAC52986
  ref <309>: DATABASE ENTRY DATE: 2002-06-15

SEQ ID NO: 13704 - DNA, 2511 bp, Homo sapiens; identical to SEQ ID NO: 13700
  ref <308>: DATABASE ACCESSION NUMBER: EMBL / AF308803
  ref <309>: DATABASE ENTRY DATE: 2001-03-19

SEQ ID NO: 13705 - protein, 617 aa, Homo sapiens; identical to SEQ ID NO: 8438
  ref <308>: DATABASE ACCESSION NUMBER: SWISS-Prot / AAG34680
  ref <309>: DATABASE ENTRY DATE: 2002-06-15

SEQ ID NO: 13706 - DNA, 1756 bp, Rattus norvegicus
  misc_feature (1)..(1756): n=a, c, g or t
  ref <308>: DATABASE ACCESSION NUMBER: EMBL / U35345
  ref <309>: DATABASE ENTRY DATE: 2000-03-04
ctgggtcggggagacctttcctctctggccgtttcctaattctgaatcatgtctgataacggggagctagaggacaagcccccagcacctccagtgcggatgagcagcaccatttttagcactggaggaaaggatcctttatcagccaatcacagtttgaagcctttgccttctgttccagaggaaaaaaaaccgaggaacaaaatcatctccatattctcaagcacagaaaaaggaagtaaaaagaaagaaaaagaacggccagagatttctccgccgtctgattttgagcataccatccatgttggctttgatgctgttacgggagagttcactggcatgccagagcagtgggcacggctgttgcagacctccaacattaccaaactggagcagaagaagaacccgcaggctgtgctggatgtcttgaagttctacgactccaacactgtgaagcagaagtacctgagcttcactcctcctgagaaagatggctttccttctggaacaccagcactgaacaccaaggggtcagagacatcagctgtggtgacagaggaagacgatgacgatgaagatgctgctcctcccgtcattgcccctcggccagatcatacaaaatcaatctacacaaggtctgtcatcgaccctattcctgctccagttggtgactctaatgtcgacagtggtgccaagtcttcagacaaacagaaaaagaaagccaagatgaccgatgaagagattatggagaaattaagaactattgtgagcataggtgaccctaagaaaaaatacacaagatatgaaaaaatcgggcaaggggcttctggtacagtttttactgcaactgatgtggccctggggcaagaggttgctatcaagcagattaatttacagaaacaaccaaagaaggaattgatcattaatgaaattctggtgatgaaggagttaaagaatcccaacatagttaacttcttggacagttacctggtaggagacgagttgtttgtggtaatggagtaccttgctggtgggtccctcactgatgtcgtgacagaaacctgcatggatgaagcgcagatcgcagctgtgtgcagagagtgtttacaggcgttggagtttttacatgctaatcaagtgatccacagagacatcaaaagtgacaatgtgcttttgggaatggaaggctcagttaaactcactgattttggcttctgtgcccagatcacccctgaacagagcaaacgcagtactatggttggaacgccatactggatggcaccggaggtagtcacgcggaaagcctatggccccaaagttgacatatggtctctgggcatcatggctatcgaaatggtggaaggagagcctccatacctcaatgaaaatcctttacgggcattatacctgatagcaacgaatggaacacctgagctccagaatccagaaaaactttcccccatatttcgggatttcttaaatcggtgtttggaaatggatgtggagaagaggggttcagccaaagaactattacagcatcctttcctgaaactggccaaaccattatccagcttgacncctctgatcctggcagctaaagaagcaatgaagagtaaccgctaacgtcgtcagcgaggcctcatgttcctttatccattttctaaagaagtcttttaatacatgaaattgttactctgaggggtgtaaagagacagtttgcatcacatggagaaaagcaagcaaacttattattttc

SEQ ID NO: 13707 - protein, 524 aa, Rattus norvegicus
  ref <308>: DATABASE ACCESSION NUMBER: SWISS-Prot / AAA79064
  ref <309>: DATABASE ENTRY DATE: 2002-06-15
MSDNGELEDKPPAPPVRMSSTIFSTGGKDPLSANHSLKPLPSVPEEKKPRNKIISIFSSTEKGSKKKEKERPEISPPSDFEHTIHVGFDAVTGEFTGMPEQWARLLQTSNITKLEQKKNPQAVLDVLKFYDSNTVKQKYLSFTPPEKDGFPSGTPALNTKGSETSAVVTEEDDDDEDAAPPVIAPRPDHTKSIYTRSVIDPIPAPVGDSNVDSGAKSSDKQKKKAKMTDEEIMEKLRTIVSIGDPKKKYTRYEKIGQGASGTVFTATDVALGQEVAIKQINLQKQPKKELIINEILVMKELKNPNIVNFLDSYLVGDELFVVMEYLAGGSLTDVVTETCMDEAQIAAVCRECLQALEFLHANQVIHRDIKSDNVLLGMEGSVKLTDFGFCAQITPEQSKRSTMVGTPYWMAPEVVTRKAYGPKVDIWSLGIMAIEMVEGEPPYLNENPLRALYLIATNGTPELQNPEKLSPIFRDFLNRCLEMDVEKRGSAKELLQHPFLKLAKPLSSLTPLILAAKEAMKSNR

SEQ ID NO: 13708 - DNA, 2019 bp, Homo sapiens
  ref <308>: DATABASE ACCESSION NUMBER: Refseq / NM_002577
  ref <309>: DATABASE ENTRY DATE: 2001-10-16
gaccttggcttgcccggggccatttcataattctgaatcatgtctgataacggagaactggaagataagcctccagcacctcctgtgcgaatgagcagcaccatctttagcactggaggcaaagaccctttgtcagccaatcacagtttgaaacctttgccctctgttccagaagagaaaaagcccaggcataaaatcatctccatattctcaggcacagagaaaggaagtaaaaagaaagaaaaggaacggccagaaatttctcctccatctgattttgagcacaccatccatgttggctttgatgctgttactggagaattcactggcatgccagaacagtgggctcgattactacagacctccaatatcaccaaactagagcaaaagaagaatcctcaggctgtgctggatgtcctaaagttctacgactccaacacagtgaagcagaaatatctgagctttactcctcctgagaaagatggccttccttctggaacgccagcactgaatgccaagggaacagaagcacccgcagtagtgacagaggaggaggatgatgatgaagagactgctcctcccgttattgccccgcgaccggatcatacgaaatcaatttacacacggtctgtaattgaccctgttcctgcaccagttggtgattcacatgttgatggtgctgccaagtctttagacaaacagaaaaagaagcctaagatgacagatgaagagattatggagaaattaagaactatcgtgagcataggtgaccctaagaaaaaatatacaagatatgaaaaaattggacaaggggcttctggtacagttttcactgctactgacgttgcactgggacaggaggttgctatcaaacaaattaatttacagaaacagccaaagaaggaactgatcattaacgagattctggtgatgaaagaattgaaaaatcccaacatcgttaactttttggacagttacctggtaggagatgaattgtttgtggtcatggaataccttgctggggggtcactcactgatgtggtaacagaaacagcttgcatggatgaagcacagattgctgctgtatgcagagagtgtttacaggcattggagtttttacatgctaatcaagtgatccacagagacatcaaaagtgacaatgtacttttgggaatggaaggatctgttaagctcactgactttggtttctgtgcccagatcacccctgagcagagcaaacgcagtaccatggtcggaacgccatactggatggcaccagaggtggttacacggaaagcttatggccctaaagtcgacatatggtctctgggtatcatggctattgagatggtagaaggagagcctccatacctcaatgaaaatcccttgagggccttgtacctaatagcaactaatggaaccccagaacttcagaatccagagaaactttccccaatatttcgggatttcttaaatcgatgtttggaaatggatgtggaaaaaaggggttcagccaaagaattattacagcatcctttcctgaaactggccaaaccgttatctagcttgacaccactgatcatggcagctaaagaagcaatgaagagtaaccgttaacatcactgctgtgggctcatactcttttttccattttctacaagaagccttttagtatatgaaaatgatgactctgttgggggtttaaagaaatggtctgcataacctgaatgaaagaaggaaatgactattctctgaagacaaccaagagaaaattggaaaagacaaggtatgactttgttatgaacccctgcttttaggggtccaggaagggatttgtgggacttgaattcactaggcttaggtctttcaggaaacaggctatcaggggcatttatcatgtgtgagattggattctacttgggtgatttggtggatagacccatgaatggcccctgggggttttcaatcttggattggaggtgggggtttcagagtgttgccacgtctagctcctctccc

SEQ ID NO: 13709 - protein, 525 aa, Homo sapiens [sequence omitted]

SEQ ID NO: 13710 - DNA, 2519 bp, Rattus norvegicus; identical to SEQ ID NO: 8491
  ref <308>: DATABASE ACCESSION NUMBER: EMBL / U36771
  ref <309>: DATABASE ENTRY DATE: 1999-03-29

SEQ ID NO: 13711 - protein, 828 aa, Rattus norvegicus; identical to SEQ ID NO: 8492
  ref <308>: DATABASE ACCESSION NUMBER: SWISS-Prot / AAB39470
  ref <309>: DATABASE ENTRY DATE: 1999-07-15

SEQ ID NO: 13712 - DNA, 6346 bp, Homo sapiens; identical to SEQ ID NO: 8493
  ref <308>: DATABASE ACCESSION NUMBER: Refseq / XM_034422
  ref <309>: DATABASE ENTRY DATE: 2002-08-01

SEQ ID NO: 13713 - protein, 828 aa, Homo sapiens; identical to SEQ ID NO: 8494
  ref <308>: DATABASE ACCESSION NUMBER: Refseq / XP_034422
  ref <309>: DATABASE ENTRY DATE: 2002-08-01

SEQ ID NO: 13714 - DNA, 2519 bp, Rattus norvegicus; identical to SEQ ID NO: 8491
  ref <308>: DATABASE ACCESSION NUMBER: EMBL / U36773
  ref <309>: DATABASE ENTRY DATE: 1999-03-29

SEQ ID NO: 13715 - protein, 828 aa, Rattus norvegicus; identical to SEQ ID NO: 8492
  ref <308>: DATABASE ACCESSION NUMBER: SWISS-Prot / AAB39470
  ref <309>: DATABASE ENTRY DATE: 1999-07-15

SEQ ID NO: 13716 - DNA, 6346 bp, Homo sapiens; identical to SEQ ID NO: 8493
  ref <308>: DATABASE ACCESSION NUMBER: Refseq / XM_034422
  ref <309>: DATABASE ENTRY DATE: 2002-08-01

SEQ ID NO: 13717 - protein, 828 aa, Homo sapiens; identical to SEQ ID NO: 8494
  ref <308>: DATABASE ACCESSION NUMBER: Refseq / XP_034422
  ref <309>: DATABASE ENTRY DATE: 2002-08-01

SEQ ID NO: 13718 - DNA, 2519 bp, Rattus norvegicus; identical to SEQ ID NO: 8491
  ref <308>: DATABASE ACCESSION NUMBER: EMBL / U36773
  ref <309>: DATABASE ENTRY DATE: 1999-03-29

SEQ ID NO: 13719 - protein, 828 aa, Rattus norvegicus; identical to SEQ ID NO: 8492
  ref <308>: DATABASE ACCESSION NUMBER: SWISS-Prot / AAB39470
  ref <309>: DATABASE ENTRY DATE: 1999-07-15

SEQ ID NO: 13720 - DNA, 6346 bp, Homo sapiens; identical to SEQ ID NO: 8493
  ref <308>: DATABASE ACCESSION NUMBER: Refseq / XM_034422
  ref <309>: DATABASE ENTRY DATE: 2002-08-01

SEQ ID NO: 13721 - protein, 828 aa, Homo sapiens; identical to SEQ ID NO: 8494
  ref <308>: DATABASE ACCESSION NUMBER: Refseq / XP_034422
  ref <309>: DATABASE ENTRY DATE: 2002-08-01

SEQ ID NO: 13722 - DNA, 1055 bp, Rattus norvegicus
  ref <308>: DATABASE ACCESSION NUMBER: EMBL / U36786
  ref <309>: DATABASE ENTRY DATE: 2000-03-04
acagtatcctgttttttgcccacctctgcatgttctttgaagagaacaggtctaagcccattgatctgtgcattgctttcttatccttaacccaactaatgctgcttgtaactatgggactcatagctgcagacatgtttatggctcaggggatatgggatattaccacatgcaggtcccttatctattttcacagacttttgaggggtttcaacctttgtgctgcctgtctactgcatatcctttggaccttcactctcagtcctagaagctcctgtttaacaaagtttaaacataaatctccccatcacatctcaggtgcctatcttttcttctgtgttctctatatgtcctttagcagtcacctctttgtattggtcattgctacctccaatttaacctcagatcattttatgtatgttactcagtcctgctcacttctacccatgagttactccagaacaagcacgttttccttactgatggtcaccagggaagtctttcttatcagtctcatggccctgtccagtgggtacatggtgactctcctatggaggcacaagaagcaggcccagcatcttcacagcaccagactttcttcaaaagcatccccacagcaaagggccaccaggaccatcctgctgcttatgaccttctttgtggttttctacattttaggcactgttatcttccactcaaggactaagttcaaggatgggtcaatcttctactgtgtccaaattattgtgtcccatagctatgccactatcagcccatttgtgtttgttttttctgaaaagcgcataatcaagttttttagatcaatgtgtggcagaatagtaaatacttgattattcactgatgagtatgggtcatgaatatagtctagtaaattgtgatcagagttatggctcatgacatattaaaaacattctctaatttaagtttaacatataaaattatcttatttctcttaaatgtgtttactttgtgtgtattaaaagtatgtaaaagataattaatccccaaatacacctttttttcaaattaaaaaa

SEQ ID NO: 13723 - protein, 273 aa, Rattus norvegicus
  ref <308>: DATABASE ACCESSION NUMBER: SWISS-Prot / AAA92008
  ref <309>: DATABASE ENTRY DATE: 2002-06-01
MFFEENRSKPIDLCIAFLSLTQLMLLVTMGLIAADMFMAQGIWDITTCRSLIYFHRLLRGFNLCAACLLHILWTFTLSPRSSCLTKFKHKSPHHISGAYLFFCVLYMSFSSHLFVLVIATSNLTSDHFMYVTQSCSLLPMSYSRTSTFSLLMVTREVFLISLMALSSGYMVTLLWRHKKQAQHLHSTRLSSKASPQQRATRTILLLMTFFVVFYILGTVIFHSRTKFKDGSIFYCVQIIVSHSYATISPFVFVFSEKRIIKFFRSMCGRIVNT

SEQ ID NO: 13724 - DNA, 1313 bp, Homo sapiens
  ref <308>: DATABASE ACCESSION NUMBER: Refseq / NM_020633
  ref <309>: DATABASE ENTRY DATE: 2002-01-10
atggttggagacacattaaaacttctgtctccactgatgacaagatacttctttctgcttttttattctactgattcttcagacctcaatgaaaatcaacatcccctagattttgatgaaatggcttttggaaaagtaaaatcagggattagcttcctcattcagactggagttgggatcctgggaaattcctttctcctttgtttttataacttaattttgttcactggacacaagctgagacccacggacttgattctcagccaactggccttggctaactccatggtccttttctttaaagggatacctcagacaatggcagcttttggattgaaatatttgctgaatgacactggatgtaagtttgtcttttattatcacagggtgggcacaagagtttccctcagcaccatctgccttctcaatggattccaagccattaagctcaaccccagtatatgcaggtggatggagatcaagattagatccccaaggtttattgacttctgttgtctcctctgctgggccccccatgtcttgatgaatgcatctgttcttctattagtgaatggcccactgaatagcaaaaacagtagtgcaaaaaacaattatggatactgttcttacaaagcatcaaagagatttagctcattacatgcagtcttatatttttcccctgattttatgagtttgggcttcatggtctgggccagtggctccatggtcttcttcctctacagacacaagcagcaagtccaacacaatcacagcaacagactctcctgcagaccttcccaggaagccagagccacacacaccatcatggtcctggtgagctccttttttgttttctattcagtccatagttttctgacaatttggacaactgtagttgcaaacccaggccagtggatagtgaccaactctgtgttggtcgcctcatgtttcccagcacgcagcccttttgtcctcatcatgagtgatactcatatctctcagttctgttttgcctgcaggacaaggaaaacactctttcctaatctggttgtcatgccatgagtcttttctcttcatggaattcagctatttatcataactcttgctaagatttaggaaatattaactactagttatttgtgatagcaacatacacatggccagtaatgctcttgtccaggaagatctaataccagagctaaaaatgaaagtcatggatactgttacacaaagaacactctatataactgtgttaagtccttcagacaagttcaggaaatcaaaaagtttaaaaagggaattctttagagatt

SEQ ID NO: 13725 - protein, 353 aa, Homo sapiens; identical to SEQ ID NO: 8502
  ref <308>: DATABASE ACCESSION NUMBER: Refseq / NP_065684
  ref <309>: DATABASE ENTRY DATE: 2002-01-10

SEQ ID NO: 13726 - DNA, 1470 bp, Rattus norvegicus; identical to SEQ ID NO: 8519
  ref <308>: DATABASE ACCESSION NUMBER: EMBL / U38253
  ref <309>: DATABASE ENTRY DATE: 2000-03-04

SEQ ID NO: 13727 - protein, 452 aa, Rattus norvegicus; identical to SEQ ID NO: 8520
  ref <308>: DATABASE ACCESSION NUMBER: SWISS-Prot / AAC52788
  ref <309>: DATABASE ENTRY DATE: 1999-07-15

SEQ ID NO: 13728 - DNA, 1602 bp, Homo sapiens
  ref <308>: DATABASE ACCESSION NUMBER: Refseq / NM_020365
  ref <309>: DATABASE ENTRY DATE: 2002-11-05
ggagatcgctgggagcggttgcgcgtgcggggagctgagttatagctgtgacttctgccctgccaggccgcacacagcggtctgacccggtttggtttgtaaatggaatttcaagcagtagtgatggcagtaggtggaggatctcggatgacagacctaacttccagcattcccaaacctctgcttccagttgggaacaaacctttaatttggtacccattgaacctgcttgagcgtgttggatttgaagaagtcattgtggttacaaccagggatgttcaaaaggctctatgtgcagaattcaagatgaaaatgaagccagatattgtgtgtattcctgatgacgctgacatgggaactgcagattctttgcgctacatatatccaaaacttaagacagatgtgctggtgctgagctgtgatctgataacagacgttgccttacatgaggttgtggacctgtttagagcttatgatgcatcacttgctatgttgatgagaaaaggccaagatagcatagaacctgttcccggtcaaaaggggaaaaaaaaagcagtggagcagcgtgacttcattggagtggacagcacaggaaagaggctgctcttcatggctaatgaagcagacttggatgaagagctggtcattaagggatccatcctacagaagcatcctagaatacgtttccacacgggtcttgtggatgcccacctctactgtttgaaaaaatacatcgtggatttcctaatggaaaatgggtcaataacttctatccggagtgaactgattccatatttagtgagaaaacagttttcctcagcttcctcacaacagggacaagaagaaaaagaggaggatctaaagaaaaaggagctgaagtccttagatatctacagttttataaaagaagccaatacactgaacctggctccctatgatgcctgctggaatgcctgtcgaggagacaggtgggaagacttgtccagatcacaggtgcgctgctatgtccacatcatgaaagaggggctctgctctcgagtgagcacactgggactctacatggaagcaaacagacaggtgcccaaattgctgtctgctctctgtccagaagaaccaccagtccattcgtcagcccagattgtcagcaaacacctggttggagttgacagcctcattgggccagagacacagattggagagaagtcatccattaagcgctcagtcattggctcatcctgtctcataaaagatagagtgactattaccaattgccttctcatgaactcagtcactgtggaggaaggaagcaatatccaaggcagtgtcatctgcaacaatgctgtgatcgagaagggtgcagacatcaaggactgcttgattggaagtggccagaggattgaagccaaagctaaacgagtgaatgaggtgatcgtggggaatgaccagctcatggagatctgagttctgagcaagtcagactccttccttttggcctccaaagccacagatgttggccggcccacctgtttaactctgtatttatttcccaataaagaagggcttccaaaggtaaaaaaaaaaaaaaaaaaaaaaaaaaaaaaa

SEQ ID NO: 13729 - protein, 452 aa, Homo sapiens; identical to SEQ ID NO: 8522
  ref <308>: DATABASE ACCESSION NUMBER: Refseq / NP_065098
  ref <309>: DATABASE ENTRY DATE: 2002-11-05

SEQ ID NO: 13730 - DNA, 1470 bp, Rattus norvegicus; identical to SEQ ID NO: 8519
  ref <308>: DATABASE ACCESSION NUMBER: EMBL / U38253
  ref <309>: DATABASE ENTRY DATE: 2000-03-04

SEQ ID NO: 13731 - protein, 452 aa, Rattus norvegicus; identical to SEQ ID NO: 8520
  ref <308>: DATABASE ACCESSION NUMBER: SWISS-Prot / AAC52788
  ref <309>: DATABASE ENTRY DATE: 1999-07-15

SEQ ID NO: 13732 - DNA, 1602 bp, Homo sapiens; identical to SEQ ID NO: 13728
  ref <308>: DATABASE ACCESSION NUMBER: Refseq / NM_020365
  ref <309>: DATABASE ENTRY DATE: 2002-11-05

SEQ ID NO: 13733 - protein, 452 aa, Homo sapiens; identical to SEQ ID NO: 8522
  ref <308>: DATABASE ACCESSION NUMBER: Refseq / NP_065098
  ref <309>: DATABASE ENTRY DATE: 2002-11-05

SEQ ID NO: 13734 - DNA, 1470 bp, Rattus norvegicus; identical to SEQ ID NO: 8519
  ref <308>: DATABASE ACCESSION NUMBER: EMBL / U38253
  ref <309>: DATABASE ENTRY DATE: 2000-03-04

SEQ ID NO: 13735 - protein, 452 aa, Rattus norvegicus; identical to SEQ ID NO: 8520
  ref <308>: DATABASE ACCESSION NUMBER: SWISS-Prot / AAC52788
  ref <309>: DATABASE ENTRY DATE: 1999-07-15

SEQ ID NO: 13736 - DNA, 1602 bp, Homo sapiens; identical to SEQ ID NO: 13728
  ref <308>: DATABASE ACCESSION NUMBER: Refseq / NM_020365
  ref <309>: DATABASE ENTRY DATE: 2002-11-05

SEQ ID NO: 13737 - protein, 452 aa, Homo sapiens; identical to SEQ ID NO: 8522
  ref <308>: DATABASE ACCESSION NUMBER: Refseq / NP_065098
  ref <309>: DATABASE ENTRY DATE: 2002-11-05

SEQ ID NO: 13738 - DNA, 1876 bp, Rattus norvegicus
  ref <308>: DATABASE ACCESSION NUMBER: EMBL / U40628
  ref <309>: DATABASE ENTRY DATE: 2000-03-04
cggtaattatcgcaattcctacaggcgtaaaagtattcagctgactcgctacactacatggaggaaatatcaaatgatcccccgccatattatgagccttagggtttatcttcttattcacagtagggggcctaacagggatcgtactatctaactcatcccttgacattgtacttcatgatacatactatgtagtagctcacttccactatgtcttatctataggagcagtattcgccatcatagctggcttcgtccactgattcccactattctcaggctataccctaaatgacacatgagcaaaagcccactttgccattatatttgtaggtgtaaacataacatttttccctcaacacttcctagtattagcggggatacctcgtcgttactctgattatccagatgcttacaccacatgaaatacagtctcctctataggctcattcatctcacttacggccgtccttgtaatgatcttcatgatttgagaagccttcgcatcaaaacgagaagtactctcaatttcctactcctcaactaacctagaatgactgcatggatgccccccaccctaccacacattcgaagaaccttcctacgtaaaagttaaataagaaaggaaggattcgaaccccctacaactggtttcaagccaatttcataaccattatgtctttctcaataaaaaaaaaaaaaaaaccacttccttccttcccaggctaccgggaccgcagctatgaccctccatgcccaggccactggacgccagaggcacccagttcagggaccacatgtcctgggctgcccagagcttcagaggaagaggagatcggaggtcctgaggactctgaggcagtacagcctcgaacaccagaggagccagaactagaagctgaagctactaaaggggatgagccagacctggaacaagaaatggaaccagaaccagagccagaggtagaaccggagccagagccggagccggagccggagccggagccggagccggagccggagccggagccggagccagagcgagagcctgacttccaagaaggggatgagtctgaaggttgtgagaacacctaaaccctagcttgcaggcttgttagaaattgtggactgggaagtaggggttgatccccactccactgaccatcattttcatctctagattcttgaaggccagaatatccttacctgtccaaatctgattcaagctggataagatctggaaacctgccagaactggaccaagtcaatgcagcaagactccatttactgccaaatgagtaaactcgggagggttagcctggacctgattcttcacaactcaggctctttactcaagaatggtctgaatcccactgacctgagcaggcttgtgtgaaaaataccatcccccccaccaacagtattccactcccaaagtagcccaagctgtatttctagagatcttagattcaggcccctaaatcagaccctcttccactccctttttccccctcaggggccatttgggagcccaagtgggcaacacttctacaccatggaaacgactagacttaagagtatcaagcaagtgaaggtggctggctgtccatccacacacagagagaagtcttggagctcacagtcttgaaggggggacctgagagaaaactggagtagacagaagccacacgcatcattgtaactgctctttaattgtctggccttcctctgaactgggagctccgtgtggggtgtggggtctaaccagtcacagacatacacaaggagctctgtacattatctactaagcaaatgaataaaaacttcccagctgtgtttccaagctttcacagatggaaaaattaaataaaaagcc

SEQ ID NO: 13739 - protein, 140 aa, Rattus norvegicus
  misc_feature (1)..(140): Xaa=Unknown amino acid
MSFSIKKKKKPLPSFPGYRDRSYDPPCPGHWTPEAPSSGTTCPGLPRASEEEEIGGPEDSEAVQPRTPEEPELEAEATKGDEPDLEQEMEPEPEPEVEPEPEPEPEPEPEPEPEPEPEPEPEREPDFQEGDESEGCENTX

SEQ ID NO: 13740 - DNA, 900 bp, Homo sapiens
  ref <308>: DATABASE ACCESSION NUMBER: EMBL / AF043244
  ref <309>: DATABASE ENTRY DATE: 2000-03-03
agcctgaggaggagacaggacagagcgtctggagaggcaggaggacaccgagttccccgtgttggcctccaggtcctgtgcttgcggagccgtccggcggctgggatcgagccccgacaatgggcaacgcgcaggagcggccgtcagagactatcgaccgcgagcggaaacgcctggtcgagacgctgcaggcggactcgggactgctgttggacgcgctgctggcgcggggcgtgctcaccgggccagagtacgaggcattggatgcactgcctgatgccgagcgcagggtgcgccgcctactgctgctggtgcagggcaagggcgaggccgcctgccaggagctgctacgctgtgcccagcgtaccgcgggcgcgccggaccccgcttgggactggcagcacgtgggtccgggctaccgggaccgcagctatgaccctccatgcccaggccactggacgccggaggcacccggctcggggaccacatgccccgggttgcccagagcttcagaccctgacgaggccgggggccctgagggctccgaggcggtgcaatccgggaccccggaggagccagagccagagctggaagctgaggcctctaaagaggctgaaccggagccggagccagagccagagctggaacccgaggctgaagcagaaccagagccggaactggagccagaaccggacccagagcccgagcccgacttcgaggaaagggacgagtccgaagattcctgaaggccagagctcttgacaggcggtgccccgcccatgctggataggacctgggatgctgctggagctgaatcggatgccaccaaggctcggtccagcccagtaccgctggaagtgaataaactccggagggtcggacgggacctgggctctctcc

SEQ ID NO: 13741 - protein, 219 aa, Homo sapiens
  ref <308>: DATABASE ACCESSION NUMBER: SWISS-Prot / AAC34993
  ref <309>: DATABASE ENTRY DATE: 2002-06-15
MGNAQERPSETIDRERKRLVETLQADSGLLLDALLARGVLTGPEYEALDALPDAERRVRRLLLLVQGKGEAACQELLRCAQRTAGAPDPAWDWQHATGTAAMTLHAQATGRRRHPARGPHAPGCPELQTLTRPGALRAPRRCNPGPRRSQSQSWKLRPLKRLNRSRSQSQSWNPRLKQNQSRNWSQNRTQSPSPTSRKGTSPKIPEGQSSDRRCPAHAG

SEQ ID NO: 13742 - DNA, 1647 bp, Rattus norvegicus
  ref <308>: DATABASE ACCESSION NUMBER: EMBL / U40819
  ref <309>: DATABASE ENTRY DATE: 2002-08-17
atggccgagaagcagaagcacgacgggcgggtgaagatcggccactacatcctgggggacacgctgggcgtcggcaccttcgggaaagtgaaggtgggcaagcacgagttgactggacataaagttgctgtgaagatactcaaccggcagaagattcgaagcctggacgtggtcgggaaaatccgcagagagatccagaacctgaagcttttcaggcaccctcatataatcaaactgtaccaggtcatcagtacaccgtctgatattttcatggtcatggaatatgtctcaggaggagagctatttgattatatctgtaaaaatggaaggttggacgaaaaggagagtcgacgtctgttccagcagatcctttctggtgtggactattgtcacaggcatatggtggtccacagagatttgaaacctgaaaacgtcctgcttgatgcacacatgaatgcaaagatagccgacttcggtctttcaaacatgatgtcagatggtgaatttttaagaacgagctgtggctcgcccaattatgctgcaccagaagtaatttcaggaagattgtacgcaggccctgaagtagacatctggagcagcggggtcattctctatgctttgctgtgtggaactctcccttttgatgatgaccacgtgccaactctttttaagaagatatgtgacgggatattttatacccctcagtatttgaatccctctgtaataagccttttgaagcatatgctgcaggtagatcctatgaagagggccacaataaaagatatcagggaacatgaatggtttaagcaggaccttccaaaatatctctttcctgaagacccgtcttatagttcaaccatgattgatgatgaagccttaaaagaagtgtgtgagaagttcgagtgctcagaggaggaggtcctcagctgcctgtacaacagaaaccaccaggacccactggcagttgcctaccacctcataatagacaacaggagaataatgaacgaagccaaagatttctacttggcaacaagcccacccgattctttcctcgatgatcaccatttaactcggcctcaccctgagagagtaccattcttggttgccgaaacaccaagggcccgacacaccctagatgaattaaacccacagaaatccaaacaccaaggcgtacggaaggcaaagtggcatttggggattcgaagtcaaagccgacccaatgacatcatggcagaagtgtgtagagcaatcaagcagttggactatgaatggaaggttgtaaacccctattatttgcgtgtgcgaaggaagaaccctgtgacaagcacattttccaaaatgagtctacagctataccaagtggatagtaggacttacttattggatttccgaagtattgatgatgagattacagaagccaaatcagggactgctactccacagagatcgggatccatcagcaactatcgatcttgccaaaggagcgactccgacgccgaggctcaaggaaagccctcagaagtctctcttacctcatccgtgacctccctcgactcctctcctgttgacgtagctccaagaccaggaagtcacacgatagaattttttgaaatgtgtgcaaatctaattaaaattcttgcacagtaa

SEQ ID NO: 13743 - protein, 548 aa, Rattus norvegicus
  ref <308>: DATABASE ACCESSION NUMBER: SWISS-Prot / AAC52355
  ref <309>: DATABASE ENTRY DATE: 2002-06-15
MAEKQKHDGRVKIGHYILGDTLGVGTFGKVKVGKHELTGHKVAVKILNRQKIRSLDVVGKIRREIQNLKLFRHPHIIKLYQVISTPSDIFMVMEYVSGGELFDYICKNGRLDEKESRRLFQQILSGVDYCHRHMVVHRDLKPENVLLDAHMNAKIADFGLSNMMSDGEFLRTSCGSPNYAAPEVISGRLYAGPEVDIWSSGVILYALLCGTLPFDDDHVPTLFKKICDGIFYTPQYLNPSVISLLKHMLQVDPMKRATIKDIREHEWFKQDLPKYLFPEDPSYSSTMIDDEALKEVCEKFECSEEEVLSCLYNRNHQDPLAVAYHLIIDNRRIMNEAKDFYLATSPPDSFLDDHHLTRPHPERVPFLVAETPRARHTLDELNPQKSKHQGVRKAKWHLGIRSQSRPNDIMAEVCRAIKQLDYEWKVVNPYYLRVRRKNPVTSTFSKMSLQLYQVDSRTYLLDFRSIDDEITEAKSGTATPQRSGSISNYRSCQRSDSDAEAQGKPSEVSLTSSVTSLDSSPVDVAPRPGSHTIEFFEMCANLIKILAQ

SEQ ID NO: 13744 - DNA, 1707 bp, Homo sapiens
  ref <308>: DATABASE ACCESSION NUMBER: EMBL / AF100763
  ref <309>: DATABASE ENTRY DATE: 2001-05-31
agtatggcgacagccgagaagcagaaacacgacgggcgggtgaagatcggccactacattctgggtgacacgctgggggtcggcaccttcggcaaagtgaaggttggcaaacatgaattgactgggcataaagtagctgtgaagatactcaatcgacagaagattcggagccttgatgtggtaggaaaaatccgcagagaaattcagaacctcaagcttttcaggcatcctcatataattaaactgtaccaggtcatcagtacaccatctgatattttcatggtgatggaatatgtctcaggaggagagctatttgattatatctgtaagaatggaaggctggatgaaaaagaaagtcggcgtctgttccaacagatcctttctggtgtggattattgtcacaggcatatggtggtccatagagatttgaaacctgaaaatgtcctgcttgatgcacacatgaatgcaaagatagctgattttggtctttcaaacatgatgtcagatggtgaatttttaagaacaagttgtggctcacccaactatgctgcaccagaagtaatttcaggaagattgtatgcaggcccagaggtagatatatggagcagtggggttattctctatgctttattatgtggaacccttccatttgatgatgaccatgtgccaactctttttaagaagatatgtgatgggatcttctatacccctcaatatttaaatccttctgtgattagccttttgaaacatatgctgcaggtggatcccatgaagagggccacaatcaaagatatcagggaacatgaatggtttaaacaggaccttccaaaatatctctttcctgaggatccatcatatagttcaaccatgattgatgatgaagccttaaaagaagtatgtgaaaagtttgagtgctcagaagaggaagttctcagctgtctttacaacagaaatcaccaggatcctttggcagttgcctaccatctcataatagataacaggagaataatgaatgaagccaaagatttctatttggcgacaagcccacctgattcttttcttgatgatcatcacctgactcggccccatcctgaaagagtaccattcttggttgctgaaacaccaagggcacgccatacccttgatgaattaaatccacagaaatccaaacaccaaggtgtaaggaaagcaaaatggcatttaggaattagaagtcaaagtcgacccaatgatattatggcagaagtatgtagagcaatcaaacaattggattatgaatggaaggttgtaaacccatattatttgcgtgtacgaaggaagaatcctgtgacaagcacttactccaaaatgagtctacagttataccaagtggatagtagaacttatctactggatttccgtagtattgatgatgaaattacagaagccaaatcagggactgctactccacagagatcgggatcagttagcaactatcgatcttgccaaaggagtgattcagatgctgaggctcaaggaaaatcctcagaagtttctcttacctcatctgtgacctcacttgactcttctcctgttgacctaactccaagacctggaagtcacacaatagaattttttgagatgtgtgcaaatctaattaaaattcttgcacaataaacagagaaacctttgcttatttcttttgcagcaataagcatgcataataaa

SEQ ID NO: 13745 - protein, 550 aa, Homo sapiens
  ref <308>: DATABASE ACCESSION NUMBER: SWISS-Prot / AAD43027
  ref <309>: DATABASE ENTRY DATE: 2002-06-15
MATAEKQKHDGRVKIGHYILGDTLGVGTFGKVKVGKHELTGHKVAVKILNRQKIRSLDVVGKIRREIQNLKLFRHPHIIKLYQVISTPSDIFMVMEYVSGGELFDYICKNGRLDEKESRRLFQQILSGVDYCHRHMVVHRDLKPENVLLDAHMNAKIADFGLSNMMSDGEFLRTSCGSPNYAAPEVISGRLYAGPEVDIWSSGVILYALLCGTLPFDDDHVPTLFKKICDGIFYTPQYLNPSVISLLKHMLQVDPMKRASIKDIREHEWFKQDLPKYLFPEDPSYSSTMIDDEALKEVCEKFECSEEEVLSCLYNRNHQDPLAVAYHLIIDNRRIMNEAKDFYLATSPPDSFLDDHHLTRPHPERVPFLVAETPRARHTLDELNPQKSKHQGVRKAKWHLGIRSQSRPNDIMAEVCRAIKQLDYEWKVVNPYYLRVRRKNPVTSTYSKMSLQLYQVDSRTYLLDFRSIDDEITEAKSGTATPQRSGSVSNYRSCQRSDSDAEAQGKSSEVSLTSSVTSLDSSPVDLTPRPGSHTIEFFEMCANLIKILAQ

SEQ ID NO: 13746 - DNA, 3819 bp, Rattus norvegicus
  ref <308>: DATABASE ACCESSION NUMBER: EMBL / U47110
  ref <309>: DATABASE ENTRY DATE: 2000-03-04
cggcccgcgcgggctgacgagcggagagtgcggtgcttcgcggtccccgagggtccgcacgccccggcagcgcggccgccagcaaccgcgcgaggagcagcgggcgggcgggcggcgccgggcccgggccgccctcgctcccacgccccggccccgccgcccgcgccggggcggcagccggcagaggaaaggcgctgcagtctccgggcctcgcggccccggtcgagcttcctgagcaccgagggcttgcgggtcctcaggggaggacacgagcccggagccgggcactgagctcttgggcgcccccaacccagttttcagaaccctccacgctgcggccgctgtcccctccggaccatggccgacgacgacgtgctgttcgaggatgtgtacgagctgtgcgaggtgatcggcaagggtcccttcagtgttgtacgacgatgcatcaacagagaaactggacaacaatttgctgtaaaaattgttgacgtagccaagttcacatcaagtccagggttaagtacagaagatctaaagcgggaagccagtatctgtcatatgctgaagcatccacacattgtagagctgttggagacatatagctcagatgggatgctttacatggtttttgaatttatggatggagcagatctgtgttttgaaattgtaaagcgagctgatgctggttttgtatacagtgaagctgtagccagtcactacatgagacagatactggaagctctacgctactgtcatgataataacataattcacagggatgtgaagccccactgtgttctcctcgcctcaaaagaaaattctgcacctgttaagcttgggggctttggggtagccatccagttaggagaatctggacttgttgctggaggacgcgttggaacacctcactttatggccccagaagtggtcaagagagagccttatggaaagcctgtggatgtctggggctgcggtgtgattcttttcatcctgctcagcggctgtttgcctttctacggaaccaaggaaagattgtttgaaggcattattaaaggaaaatataagatgaatccaaggcagtggagccatatctctgaaagtgccaaagacctagtgcgccgcatgctgatgctggatcctgctgaaaggatcactgtttatgaagcactgaatcacccatggcttaaggagcgggatcgttatgcctacaaaattcatcttccagaaacagtagaacaactgaggaaattcaatgcaaggagaaaactaaagggtgcagtactagcggctgtgtcaagtcacaaattcaattccttctacggggaccctcctgaagagttgccagatttctccgaagaccctacctcctcaggacttctagcagcagaaagagccgtctctcaggtgctggacagcctggaagagattcacgcacttacagactgcagtgaaaaggacctagattttctacacagtgttttccaggatcagcatcttcacacactgctggatctgtatgacaaaattaacacaaagtcttcgccacaaatcaggaatcctccaagcgatgcagtacagagagccaaagaggtattggaagaaatttcatgttaccctgagaataatgacgcgaaggaactaaagcgtattttaacacaacctcatttcatggccttacttcagactcaccacgtagtggcacatgaagtttacagtgatgaagcattaagggtcacacctccgccgacttccccgtatttaaacggtgattctccagaaagtgcaaatggagacatggacatggagaatgtgaccagagttcgcctggtacagtttcaaaagaacacagatgagccaatgggaatcactttgaaaatgaatgagctcaatcattgtattgttgcgagaatcatgcatggcgggatgattcacaggcaaggtacacttcatgttggtgatgaaatccgagaaatcaatggcatcagtgtcgctaaccaaacagtggaacagctacaaaaaatgcttagggaaatgcgagggagtattaccttcaagattgtgccaagctaccgcactcagtcttcgtcatgtgagagagattccccctccacttccagacagtcccctgctaatggtcatagcagcactaacaattctgtttcgatctatgtaagagcacaatttgaatatgatccagccaaggatgacctcatcccctgcaaagaagctggcatccggttccgagttggtgacatcatccagattattagtaaggatgaccacaactggtggcagggtaaactggaaaactccaaaaacggaactgcaggtctcattccttctcctgaacttcaggaatggcgagtagcttgcattgccatggagaagaccaaacaagagcagcaggccagctgtacttggtttggcaagaaaaagaagcagtacaaagataaatatttggcaaagcacaatgcagatcttgtcacgtatgaagaagtagtgaaactgccagcgttcaaaaggaaaacattagtcttattaggtgcacatggtgttgggagaagacacatcaaaaacaccctcatcacaaagcacccggagcgcttcgcgtaccccattccgcatacaaccagacctccaaagaaagatgaagaaaatggcaagaattattactttgtatctcatgaccaaatgatgcaagatatctcaaataatgaatacttggagtacggcagccatgaggatgcaatgtatgggacaaaactggagaccattcggaaaatccatgagcaggggctgattgcgattctggacgtggagcctcaggcattgaaggtcctgagaactgcagagtttcccccttttgttgtcttcattgcggcgccaactatcactccaggtttaaatgaggatgaatctcttcagcgcctgcagaaggagtccgatgtcttgcagagaacatatgcacactacttcgatctcacaattatcaacaatgaaattgatgagacaatcagacatctggaggaagctgtcgagcttgtgtgcacagccccacagtgggtcccggtctcctgggtctattaggcttctctgtggctatctgagtataaaaccaggagccacttcctatgtggaaaagcctctttgttatcggccttgtgtcagcaggtcgtggtccctagagactacctagttgtagtgtgacctacatttataattattgtcatgtccgaatagataggaggagaaaatcaattacacactaatttaaagagacagtatcttttttaatcagttctcctaaactttaataaaatgtatctttaaatgtatgtattattcaatcctttggaatgttatatttttggaaatcatagctttttatttccaaggcccctaaaaactgcacaaaatagatgctgctttctataatctattttaataataataaacatgattctgttaccttgactgggggtggaacactacattctttttagagtctgattttatggattggaatacctttctttcctttatttatttgaaatgattagtctagtgattacaaaacagtcataaatttttaaaggccttttttctctctcttttttttaagtcctttatgtaacatccagatactgtgatactgtctctttgaagcaccctgtaaaccttttagagatttgaagttgggtcttgactcttaatgcatgtggacagtcgcgagcgtttatgctgtcggtgtgtctgtgttggacaaaacaatctgtaattacagcgaagtacattccgttcacggggcataccctgggg

SEQ ID NO: 13747 - protein, 909 aa, Rattus norvegicus
  ref <308>: DATABASE ACCESSION NUMBER: SWISS-Prot / AAB19127
  ref <309>: DATABASE ENTRY DATE: 2002-06-15
MADDDVLFEDVYELCEVIGKGPFSVVRRCINRETGQQFAVKIVDVAKFTSSPGLSTEDLKREASICHMLKHPHIVELLETYSSDGMLYMVFEFMDGADLCFEIVKRADAGFVYSEAVASHYMRQILEALRYCHDNNIIHRDVKPHCVLLASKENSAPVKLGGFGVAIQLGESGLVAGGRVGTPHFMAPEVVKREPYGKPVDVWGCGVILFILLSGCLPFYGTKERLFEGIIKGKYKMNPRQWSHISESAKDLVRRMLMLDPAERITVYEALNHPWLKERDRYAYKIHLPETVEQLRKFNARRKLKGAVLAAVSSHKFNSFYGDPPEELPDFSEDPTSSGLLAAERAVSQVLDSLEEIHALTDCSEKDLDFLHSVFQDQHLHTLLDLYDKINTKSSPQIRNPPSDAVQRAKEVLEEISCYPENNDAKELKRILTQPHFMALLQTHHVVAHEVYSDEALRVTPPPTSPYLNGDSPESANGDMDMENVTRVRLVQFQKNTDEPMGITLKMNELNHCIVARIMHGGMIHRQGTLHVGDEIREINGISVANQTVEQLQKMLREMRGSITFKIVPSYRTQSSSCERDSPSTSRQSPANGHSSTNNSVSIYVRAQFEYDPAKDDLIPCKEAGIRFRVGDIIQIISKDDHNWWQGKLENSKNGTAGLIPSPELQEWRVACIAMEKTKQEQQASCTWFGKKKKQYKDKYLAKHNADLVTYEEVVKLPAFKRKTLVLLGAHGVGRRHIKNTLITKHPERFAYPIPHTTRPPKKDEENGKNYYFVSHDQMMQDISNNEYLEYGSHEDAMYGTKLETIRKIHEQGLIAILDVEPQALKVLRTAEFPPFVVFIAAPTITPGLNEDESLQRLQKESDVLQRTYAHYFDLTIINNEIDETIRHLEEAVELVCTAPQWVPVSWVY

SEQ ID NO: 13748 - DNA, 3937 bp, Homo sapiens
  ref <308>: DATABASE ACCESSION NUMBER: EMBL / AF035582
  ref <309>: DATABASE ENTRY DATE: 2000-03-03
tatcccctccggaccatggccgacgacgacgtgctgttcgaggatgtgtacgagctgtgcgaggtgatcggaaagggtcccttcagtgttgtacgacgatgtatcaacagagaaactgggcaacaatttgctgtaaaaattgttgatgtagccaagttcacatcaagtccagggttaagtacagaagatctaaagcgggaagccagtatctgtcatatgctgaaacatccacacattgtagagttattggagacatatagctcagatggaatgctttacatggttttcgaatttatggatggagcagatctgtgttttgaaatcgtaaagcgagctgacgctggttttgtgtacagtgaagctgtagccagccattatatgagacagatactggaagctctacgctactgccatgataataacataattcacagggatgtgaagccccactgtgttctccttgcctcaaaagaaaactcggcacctgttaaacttggaggctttggggtagctattcaattaggggagtctggacttgtagctggaggacgtgttggaacacctcattttatggcaccagaagtggtcaaaagagagccttacggaaagcctgtagacgtctgggggtgcggtgtgatcctttttatcctgctcagtggttgtttgcctttttacggaaccaaggaaagattgtttgaaggcattattaaaggaaaatataagatgaatccaaggcagtggagccatatctctgaaagtgccaaagacctagtacgtcgcatgctgatgctggatccagctgaaaggatcactgtttatgaagcactgaatcacccatggcttaaggagcgggatcgttacgcctacaagattcatcttccagaaacagtagagcagctgaggaaattcaatgcaaggaggaaactaaagggtgcagtactagccgctgtgtcaagtcacaaattcaactcattctatggggatccccctgaagagttaccagatttctccgaagaccctacctcctcaggagcagtctcacaggtgctggacagcctggaagagattcatgcgcttacagactgcagtgaaaaggacctagattttctacacagtgttttccaggatcagcatcttcacacactactagatctgtatgacaaaattaacacaaagtcttcaccacaaatcaggaatcttccaagcgatgcagtacagagagccaaagaggtattggaagaaatttcatgttaccctgagaataacgacgcaaaggaactaaagcgtattttaacacaacctcatttcatggccttacttcagactcacgacgtagtggcacatgaagtttacagtgatgaagcattgagggtcacacctcctcccacctctccctatttaaacggcgattctccagaaagtgctaacggagacatggatatggagaatgtgaccagagttcggctggtacagtttcaaaagaacacagatgaaccaatgggaatcactttaaaaatgaatgaactaaatcattgtattgttgcaagaattatgcatgggggcatgattcacaggcaaggtacacttcatgttggtgatgaaattcgagaaatcaatggcatcagtgtggctaaccaaacagtggaacaactgcaaaaaatgcttagggaaatgcgggggagtattaccttcaagattgtgccaagttaccgcactcagtcttcgtcctgtgaggacttgccatcaactacccaaccaaaaggacgacagatctatgtaagagcacaatttgaatatgatccagccaaggatgacctcatcccctgtaaagaagctggcattcgattcagagttggtgacatcatccagattattagtaaggatgatcataattggtggcagggtaaactggaaaactccaaaaatggaactgcaggtctcattccttctcctgaacttcaggaatggcgagtagcttgcattgccatggagaagaccaaacaggagcagcaggccagctgtacttggtttggcaagaaaaagaagcagtacaaagataaatatttggcaaagcacaatgcagtgtttgatcaattagatcttgtcacatatgaagaagtagtaaaactgccagcattcaagaggaaaacactagtcttattaggcgcacatggtgttgggagaagacacataaaaaacactctcatcacaaagcacccagaccggtttgcgtaccctattccacatacaaccagacctccaaagaaagacgaagaaaatggaaagaattattactttgtatctcatgaccaaatgatgcaagacatctctaataacgagtacttggagtacggcagccacgaggatgcgatgtatgggacaaaactggagaccatccggaagatccacgagcaggggctgattgcaatactggacgtggagcctcaggcactgaaggtcctgagaactgcagagtttgctccttttgttgttttcattgctgcaccaactattactccaggtttaaatgaagatgaatctcttcagcgtctgcagaaggagtctgacatcttacagagaacatatgcacactacttcgatctcacaattatcaacaatgaaattgatgagacaatcagacatctggaggaagctgttgagctcgtgtgcacagccccacagtgggtccctgtctcctgggtctattaggcctctccccagatatctgagcataactgggagcacctcatttgtggaaaagcctctttgttatcggccttgtgtcagcaggtcatggtccctagagactacctagttgtagtgtgacctacatttataattattgtcatgtccgaatagataggaggagaaaaacaattacacactaatttaaagagacagtatcttttttaatcagttctcctaaactttaataaaatgtatctttaaatgtatgtattattcaatcctttggaatgttatatttttggaaatcatagctttttatttccaaggcccctaaaaactgcacaaaatagatgctgctttctataatctattttaataataataaacaatgattctgttaccttgactgggggtggaacactacattctttttagagtctgattttatggattggaatattgggatatctttctttcctttatttatttgaaataattagtgtagtgattacaaaacagtcataaatttttaaaggccttttttctctctttttttttttttagaatagtattttttttttaagtcctttatgtaacatccagataatgtgatactgtctctttgaagcaccctgtaaaccttttagagatttgaagttgggtcttgactcttaatgcatgtggacagtcgcgagcgtttatgctgtcggtgtgtctgtgttggacaaaacaatctgtaatctacagcaaagtacattctacattccgttcatggggcacacccaggggaataagaataaaatgctattatgactaagttgtaaacctatgcacatcccttgcattttgggcaactttataaaaaaaaagaaactgatttttattaataataatcatgtagtgaaatgtgtttgtaattttgtctcaatttaatttgttgtaaggtggggtggggggaattgctggtttcaccatttcagatctgtgttgtctaagagtattaacgttttaattaagcaaagaaatgatttttaatctgtatgtaattgttttaaagcacccattttaagagaaaatactgtgcaatgaagaaaccagtttaggcatttgctataaactgaaatattccaaaagaatcatctataacagccctgtaaattcctttaaaatgataactaacaggacagtttgaccaattttttttaaatatacttccttttatgtgttcaataaaaaaaaaaaaaaaaaa

SEQ ID NO: 13749 - protein, 921 aa, Homo sapiens
  ref <308>: DATABASE ACCESSION NUMBER: SWISS-Prot / AAB88198
  ref <309>: DATABASE ENTRY DATE: 2002-06-15
MADDDVLFEDVYELCEVIGKGPFSVVRRCINRETGQQFAVKIVDVAKFTSSPGLSTEDLKREASICHMLKHPHIVELLETYSSDGMLYMVFEFMDGADLCFEIVKRADAGFVYSEAVASHYMRQILEALRYCHDNNIIHRDVKPHCVLLASKENSAPVKLGGFGVAIQLGESGLVAGGRVGTPHFMAPEVVKREPYGKPVDVWGCGVILFILLSGCLPFYGTKERLFEGIIKGKYKMNPRQWSHISESAKDLVRRMLMLDPAERITVYEALNHPWLKERDRYAYKIHLPETVEQLRKFNARRKLKGAVLAAVSSHKFNSFYGDPPEELPDFSEDPTSSGLLAAERAVSQVLDSLEEIHALTDCSEKDLDFLHSVFQDQHLHTLLDLYDKINTKSSPQIRNPPSDAVQRAKEVLEEISCYPENNDAKELKRILTQPHFMALLQTHDVVAHEVYSDEALRVTPPPTSPYLNGDSPESANGGMDMENVTRVRLVQFQKNTDEPMGITLKMNELNHCIVARIMHGGMIHRQGTLHVGDEIREINGISVANQTVEQLQKMLREMRGSITFKIVPSYRTQSSSCERDSPSTSRQSPANGHSSTNNSVSDLPSTTQPKGRQIYVRAQFEYDPAKDDLIPCKEAGIRFRVGDIIQIISKDDHNWWQGKLENSKNGTAGLIPSSELQEWRVACIAMEKTKQEQQASCTWFGKKKKQYKDKYLAKHNADLVTYEEVVKLPAFKRKTLVLLGAHGVGRRHIKNTLITKHPDRFAYPIPHTTRPPKRDEENGKNYYFVSHDQMMQDISNNEYLEYGSHEDAMYGTKLETIRKIHEQGLIAILDVEPQALKVLRTAEFAPFVVFIAAPTITPGLNEDESLQRLQKESDILQRTYAHYFDLTIINNEIDETIRHLEEAVELVCTAPQWVPVSWVY

SEQ ID NO: 13750 - DNA, 1896 bp, Rattus norvegicus
  ref <308>: DATABASE ACCESSION NUMBER: EMBL / U48247
  ref <309>: DATABASE ENTRY DATE: 2000-03-04
ctgaggcggagggtgcgccgcgcgggtccggagaactgcacatcgaatccttcgaaccatgagcaactacaatgtgtcattggttggcccagctccttggggtttccggctccaaggtggcaaggatttcaacatgcctctgacaatctctagtctgaaagatggtggcaaggcatcacaggcacacgtcagaataggcgatgtggttctcagcattgatggaatcagtgcccagggaatgactcatctcgaagcgcagaacaagattaaggcttgtacaggctccttgaatatgactctgcaaagagcttctgctgctgccaagtctgagccagttgctgtccagaagggggaacctaaggaagtagttaagcctgtgcccattacatctcctgctgtatccaaagtcacttccacaaccaacatggcttacaataaagtgccacggccctttggctctgtgtcttcaccaaaagtcacatccatcccatcgccatcgtccgccttcaccccagcccatgccgccacgtcatcacacgcttcccctccacctgtggctgctgtcactccccctccactctctgcatccggactgcatgctagtgccaatcctagtgctgcccagtgttcgtctccaccaaacactggtaaacctgcagttcatgtcccacggcagcccacagtcaccagcgtgtgttccgagtctgctcaggagctagcagagggacagagaagaggatcccagggtgacattaaacagcaaaatggcccaccaagaaaacacatcgtggagcgcaacacggagttttatcacatacccactcacagtgatgccagcaagaaaaggctgattgaggacactgaggactggcgcccacggactggaacgacacagtctcgttccttccgaatcctcgcccagatcactgggactgagcatttgaaagaatctgagaatgacaatgcgaagaaggcaaatagcactccggagccttctcagcagtcagcttcacctctgagcgcggcggagagcctggagagcccaggttcaaacaggccagtggtggctggcctcaggtccgctgctgctttcaagcctgtaggatccaccagtgtcaagtcaccaagctggcagcgtccaaaccaagcagcaccttctactgggagaatttcaaacagtgcaagctcttcaggtacaggggcacccatgaagccagctgtggggccaccccagccaagtgaccaagacactcttgtgcagagagctgagcacattccggcgggcaagcggactcccatgtgtgcccactgcaaccaggccatcaggggaccttttctcgtggctctggggaagtcctggcatccagaagaattcaactgtgctcactgcaaaaacacgatggcctatataggctttgtggaggagaagggagcactgtattgtgagctatgttatgagaagttctttgctcctgaatgtggccggtgccagaggaagatccttggggaagtcatcaatgctttgaagcagacctggcacgtgtcctgttttgtgtgtgtggcctgtggaaaacccatccgtaataatgttttccacttggaagatggcgagccctactgtgagacagactattatgcactttttggaacaatatgtcgcgggtgtgaattccccatagaggctggtgacatgttcctggaagctctgggctccacctggcatgacacttgctttgtgtgctccgtgtgttgtgaaagtttggaagggcagacatttttctccaagaaggacaagccactttgcaaaaaacatgctcattctgtgaatttctgaaaatcaacagttccaggaaagagaagaaatttgaaaaaaaaaaaaaaaaaaaaaaaaaaaaa

SEQ ID NO: 13751 - protein, 591 aa, Rattus norvegicus
  ref <308>: DATABASE ACCESSION NUMBER: SWISS-Prot / AAC72251
  ref <309>: DATABASE ENTRY DATE: 2003-02-01
MSNYNVSLVGPAPWGFRLQGGKDFNMPLTISSLKDGGKASQAHVRIGDVVLSIDGISAQGMTHLEAQNKIKACTGSLNMTLQRASAAAKSEPVAVQKGEPKEVVKPVPITSPAVSKVTSTTNMAYNKVPRPFGSVSSPKVTSIPSPSSAFTPAHAATSSHASPPPVAAVTPPPLSASGLHASANPSAAQCSSPPNTGKPAVHVPRQPTVTSVCSESAQELAEGQRRGSQGDIKQQNGPPRKHIVERNTEFYHIPTHSDASKKRLIEDTEDWRPRTGTTQSRSFRILAQITGTEHLKESENDNAKKANSTPEPSQQSASPLSAAESLESPGSNRPVVAGLRSAAAFKPVGSTSVKSPSWQRPNQAAPSTGRISNSASSSGTGAPMKPAVGPPQPSDQDTLVQRAEHIPAGKRTPMCAHCNQAIRGPFLVALGKSWHPEEFNCAHCKNTMAYIGFVEEKGALYCELCYEKFFAPECGRCQRKILGEVINALKQTWHVSCFVCVACGKPIRNNVFHLEDGEPYCETDYYALFGTICRGCEFPIEAGDMFLEALGSTWHDTCFVCSVCCESLEGQTFFSKKDKPLCKKHAHSVNF

SEQ ID NO: 13752 - DNA, 186 bp, Homo sapiens
  ref <308>: DATABASE ACCESSION NUMBER: Refseq / NM_005953
  ref <309>: DATABASE ENTRY DATE: 2002-11-05
atggatcccaactgctcctgcgccgccggtgactcctgcacctgcgccggctcctgcaaatgcaaagagtgcaaatgcacctcctgcaagaaaagctgctgctcctgctgccctgtgggctgtgccaagtgtgcccagggctgcatctgcaaaggggcgtcggacaagtgcagctgctgcgcctga

SEQ ID NO: 13753 - DNA, 1896 bp, Rattus norvegicus; identical to SEQ ID NO: 13750
  ref <308>: DATABASE ACCESSION NUMBER: EMBL / U48247
  ref <309>: DATABASE ENTRY DATE: 2000-03-04

SEQ ID NO: 13754 - protein, 591 aa, Rattus norvegicus; identical to SEQ ID NO: 13751
  ref <308>: DATABASE ACCESSION NUMBER: SWISS-Prot / AAC72251
  ref <309>: DATABASE ENTRY DATE: 2003-02-01

SEQ ID NO: 13755 - DNA, 186 bp, Homo sapiens; identical to SEQ ID NO: 13752
  ref <308>: DATABASE ACCESSION NUMBER: Refseq / NM_005953
  ref <309>: DATABASE ENTRY DATE: 2002-11-05

SEQ ID NO: 13756 - DNA, 1862 bp, Rattus norvegicus; identical to SEQ ID NO: 8581
  ref <308>: DATABASE ACCESSION NUMBER: EMBL / U48592
  ref <309>: DATABASE ENTRY DATE: 2001-08-03

SEQ ID NO: 13757 - protein, 570 aa, Rattus norvegicus; identical to SEQ ID NO: 8582
  ref <308>: DATABASE ACCESSION NUMBER: SWISS-Prot / AAB03502
  ref <309>: DATABASE ENTRY DATE: 2003-02-01

SEQ ID NO: 13758 - DNA, 4724 bp, Homo sapiens
  ref <308>: DATABASE ACCESSION NUMBER: Refseq / NM_002182
  ref <309>: DATABASE ENTRY DATE: 2002-10-30
tgccgggatccaggtctccggggtccgctttggccagaggcgcggaaggaagcagtgcccggcgacactgcacccatcccggctgcttttgctgcgccctctcagcttcccaagaaaggcatcgtcatgtgatcatcacctaagaactagaacatcagcaggccctagaagcctcactcttgcccctccctttaatatctcaaaggatgacacttctgtggtgtgtagtgagtctctacttttatggaatcctgcaaagtgatgcctcagaacgctgcgatgactggggactagacaccatgaggcaaatccaagtgtttgaagatgagccagctcgcatcaagtgcccactctttgaacacttcttgaaattcaactacagcacagcccattcagctggccttactctgatctggtattggactaggcaggaccgggaccttgaggagccaattaacttccgcctccccgagaaccgcattagtaaggagaaagatgtgctgtggttccggcccactctcctcaatgacactggcaactatacctgcatgttaaggaacactacatattgcagcaaagttgcatttcccttggaagttgttcaaaaagacagctgtttcaattcccccatgaaactcccagtgcataaactgtatatagaatatggcattcagaggatcacttgtccaaatgtagatggatattttccttccagtgtcaaaccgactatcacttggtatatgggctgttataaaatacagaattttaataatgtaatacccgaaggtatgaacttgagtttcctcattgccttaatttcaaataatggaaattacacatgtgttgttacatatccagaaaatggacgtacgtttcatctcaccaggactctgactgtaaaggtagtaggctctccaaaaaatgcagtgccccctgtgatccattcacctaatgatcatgtggtctatgagaaagaaccaggagaggagctactcattccctgtacggtctattttagttttctgatggattctcgcaatgaggtttggtggaccattgatggaaaaaaacctgatgacatcactattgatgtcaccattaacgaaagtataagtcatagtagaacagaagatgaaacaagaactcagattttgagcatcaagaaagttacctctgaggatctcaagcgcagctatgtctgtcatgctagaagtgccaaaggcgaagttgccaaagcagccaaggtgaagcagaaagtgccagctccaagatacacagtggaactggcttgtggttttggagccacagtcctgctagtggtgattctcattgttgtttaccatgtttactggctagagatggtcctattttaccgggctcattttggaacagatgaaaccattttagatggaaaagagtatgatatttatgtatcctatgcaaggaatgcggaagaagaagaatttgtattactgaccctccgtggagttttggagaatgaatttggatacaagctgtgcatctttgaccgagacagtctgcctgggggaattgtcacagatgagactttgagcttcattcagaaaagcagacgcctcctggttgttctaagccccaactacgtgctccagggaacccaagccctcctggagctcaaggctggcctagaaaatatggcctctcggggcaacatcaacgtcattttagtacagtacaaagctgtgaaggaaacgaaggtgaaagagctgaagagggctaagacggtgctcacggtcattaaatggaaaggggaaaaatccaagtatccacagggcaggttctggaagcagctgcaggtggccatgccagtgaagaaaagtcccaggcggtctagcagtgatgagcagggcctctcgtattcatctttgaaaaatgtatgaaaggaataatgaaaagggtaaaaagaacaaggggtgctccaggaagaaagagtccccccagtcttcattcgcagtttatggtttcataggcaaaaataatggtctaagcctcccaatagggataaatttagggtgactgtgtggctgactattctgcttcctcaggcaacactaaagtttagaaagatatcatcaacgttctgtcaccagtctctgatgccactatgttctttgcaggcaaagacttgttcaatgcgaatttccccttctacattgtctatccctgtttttatatgtctccattctttttaaaatcttaacatatggagcagcctttcctatgaatttaaatatgcctttaaaataagtcactgttgacagggtcatgagtttccgagtatagttttctttttatcttttttactcgtccgttgaaaagataatcaaggcctacattttagctgaggataatgaacttttttcctcattcggctgtataatacataaccacagcaagactgacatccacttaggatgatacaaagcagtgtaactgaaaatgtttcttttaattgatttaaaggacttgtcttctataccacccttgtcctcatctcaggtaatttatgaaatctatgtaaacttgaaaaatatttcttaatttttgtttttgctccagtcaattcctgattatccacaggtcaacccacattttttcattccttctccctatctgcttatatcgcattgctcatttagagtttgcaggaggctccatactaggttcagtctgaaagaaatctcctaatggtgctatagagagggaggtaacagaaagactcttttagggcatttttctgactcatgaaaagagcacagaaaaggatgtttggcaatttgtcttttaagtcttaaccttgctaatgtgaatactgggaaagtgattttttctcactcgtttttgttgctccattgtaaagggcggaggtcagtcttagtggccttgagagttgcttttggcattaatattctaagagaattaactgtatttcctgtcacctattcactagtgcaggaaatatacttgctccaaataagtcagtatgagaagtcactgtcaatgaaagttgttttgtttgttttcagtaatattttgctgtttttaagacttggaaaactaagtgcagagtttacagagtggtaaatatctatgttacatgtagattatacatatatatacacacgtgtatatgagatatatatcttatatctccacaaacacaaattatatatatacatatccacacacatacattacatatatctgtgtatataaatccacatgcacatgaaatatatatatatatataatttgtgtgtgtgtatgtgtatgtatatgactttaaatagctatgggtacaatattaaaaaccactggaactcttgtccagtttttaaattatgtttttactggaatgtttttgtgtcagtgttttctgtacatattatttgttaattcacagctcacagagtgatagttgtcatagttcttgccttccctaagtttatataaataacttaagtattgctacagtttatctaggttgcagtggcatctgctgtgcacagagcttccatggtcactgctaagcagtagccagccatcgggcattaattgatttcctactatattcccagcagacacatttagaaactaagctatgttaacctcagtgctcaactatttgaactgttgagtgataaaggaaacaaatataactgtaaatgaatcttggtatcctgtgaaacagaataattcgtaatttaagaaagcccttatcccggtaacatgaatgttgatgaacaaatgtaaaattatatcctatatttaagtacccataataaatcatttccctctataagtgttattgattattttaaattgaaaaaagtttcacttggatgaaaaaagtagaaaagtaggtcattcttggatctacttttttttagccttattaatatttttccctattagaaaccacaattactccctctattaacccttcacttactagaccagaaaagaacttattccagataagctttgaatatcaattcttacataaactttaggcaaacagggaatagtctagtcaccaaaggaccattctcttgccaatgctgcattccttttgcacttttggattccatatttatcccaaatgctgttgggcacccctagaaataccttgatgttttttctatttatatgcctgcctttggtacttaattttacaaatgctgtaatataaagcatatcaagtttatgtgatacgtatcattgcaagagaatttgtttcaagatttttttttaatgttccagaagatggccaatagagaacattcaagggaaatggggaaacataatttagagaacaagaacaaaccatgtctcaaatttttttaaaaaaaattaatggttttaaatatatgctatagggacgttccatgcccaggttaacaaagaactgtgatatatagagtgtctaattacaaaatcatatacgatttatttaattctcttctgtattgtaacttagatgattcccaaggactctaataaaaaatcacttcattgtatttggaaacaaaaacatcattcattaattacttattttctttccataggttttaatattttgagagtgtcttttttatttcattcatgaacttttgtatttttcatttttcatttgatttgtaaatttacttatgttaaaaataaaccatttattttcagctttg

SEQ ID NO: 13759 - protein, 570 aa, Homo sapiens; identical to SEQ ID NO: 8584
  ref <308>: DATABASE ACCESSION NUMBER: Refseq / NP_002173
  ref <309>: DATABASE ENTRY DATE: 2002-10-30

SEQ ID NO: 13760 - DNA, 3325 bp, Rattus norvegicus
  misc_feature (1)..(3325): n=a, c, g or t
  ref <308>: DATABASE ACCESSION NUMBER: EMBL / U49935
  ref <309>: DATABASE ENTRY DATE: 2000-03-04
aagcttattaaataaaaagaagccatggggttagagaggtggttcaatggtagagcgtacctgcctagcgcgaaccccagcatctatttctcctgatgttcatgtcagggcatgaactctggagctaaactggactgcagcctgcttccagcagctactagctatgtgtcctctccaaggctacctagccaaccattctaacacccagcccctactacaaaggagcaaaataatatactttctgcaaggctgtcgtgaagataatattatttattgcatctccgatatgttcagttcttgcctatagtatgtgcacgttactgttgttggcgctcacagctggttgatgtatcggagatacatggctacacaagactttgctctgccctgcaggacaggaagtttggtggtgcattcctgtaatccagaatttcacaggaagaagcagggaggggattgttgcaagctggagctattctcgtctacctagagtcaaagctacagagagttgagcctataaatgtcagagccacatagtgagaccctgtgtcataaaactaacagaacctccatttgggtaaagcacgcaatcgggaggtaaaagcagggagatcagatccagcctcgattatatattatattcaaagatagcctgggtcacataagaccctgtctccaaaagtgtcccctccccaattcgttaagtgcacagcttggagcacaggcatggtggcacacagttgtaatcccagcacttgggaaactgaggcacgaagcaggggagttcaaggtcagcgtgggctataaagtaagaagacactttctcaacaaggaaaggaaccactggggcagtgacctgtgtgacggaagtaatcccatcatgcctcctccttcttgtatgagaatctaccccacagatgcggagtctgaccccttgcgcaggtgcctggggtgtagacggctctcaatgcttacacattgttcgttgcttttctagagctcccttgggctganngagagaggagtgtctggtgggtgggcttccttctttcttcccctcctttcctctttcccatctttcttacctattgcattcttttcctctatttttgtttttcagacatagtctcgtgatacagcagctctggctaacctagaactccatgtagaccaggctggctttgaacttaaaggaatttgcttgcctctgtctccaaagtgctgggattaaaaagggtgctcttcctcccttcctttcttttgagtccctggtatggatctggccggactggaattctccacgggcctcctaccttctcccaagcatttgattacaggcatgtgccatcatgcccaaatctgcaatacgctgatctgttattgttattgttttgttcagagacagggtctcattctatagtccagggntggtctggaaacttaccatcgttctgtcagctctgaagtcctggtataacaagcataggctattgttatttggtgtggttgctttttgcttttgagatagaatcttatgtagcccaggctggtcctgaactcattaggaagccaacagtgaaccttaatcttttgatcatttctaggttctacagtgctgggggacgaaacccctggggctctacaacctcagctacatctgcagcagtttctctgtctctgtctctgtgtgtgtatgtgagagagacagagagagacagagacagagaggcagagactgtcagtttcatgaagtcaggctggccttgaagtgcctgtatagtggatcatggcattagccaggttatgagattacagatttgcaccaccacatccagctccaaatggcttttaatatgaccaacactgctcatacctcccctggagcaatgcagtgtcccattcagcatacctgagaaactgcatttcttcttttactttttttttttttttaaaattgtgtgtgtgcatgcggggcgtgtgtacatgctacagcaatcgtgtggaagttagaggacaacttatgggagtcgctttcttttcttccaccatgtgggtcccagggaccatactcagattgtcagacttagtngcggggatggtttaccctgagacactgaatcggtcggaaactacatttccgctcagctccctcctgctgctgctgctgctgctgctgctgctgctgctgctgctgctgctgctgctgcagcagatctgcggaattcgttgaagtagactaggttctaagccacgtttcccgacagactaacaatgagatctttgcagctactactgtgcttctatctgcaaagtaaagcccaactcaagtccattcctagaacccacttgaggggaagagtgacccaactacgtacgcagttattaccacattccctagagcattgaaataggacgcatacgcgaacgaataacttttggcgactagttctttcttgggtggctagagatcgcgacagggcccattgatggggaagagggcaccctcccagaaagttctctccaccctcttggtcagaagggacccgagggcccggaagcctgcgggccggagcccagcggaccaatggggctccggggagggagggagggtatagcgcccgccagccctttccgtctgcggtcccgccccttagaacgttgtgacgtcggagcattccacggttgctacatcgtcgcgagggcggggcgcctgtcagggaagcggtgcgcgcgggtggcgggcgggctggggcttctccgcacagtgccagcgccagcgccagacccgcccgcaccccgcgctctcactcacacgcgtcgcttctcctaggactcgctagcccgcactcctgctctcacccgtgagccatagcaggatggagctgctgtgttgcgagggcacccggcacgcgccccgggccgggcccgacccgcggctactgggggaccagcgtgtcctgcagagtttgctccgcttggaggagcgctacgtgccgcgaggctcctacttccagtgcgtgcaaaaggagatcaagccgcacatgcggaagatgctggcgtactggatgctggaggtaaggcccggacgggtcccctctcctcaccccacccccacccccggctctgggcaaattgaactttccctgttcgtgcttcccagtcccagccacaatctggcanagtgctttgacggcccagacttacaggggcctggccttttcacacaggcaccctaaccagctgcctgcgttctgtccctttcctttccccaaccctgatcggcttcttctgtgactgccagccacttggcactgtaactaagctt

SEQ ID NO: 13761 - protein, 293 aa, Rattus norvegicus; identical to SEQ ID NO: 1786
  ref <308>: DATABASE ACCESSION NUMBER: SWISS-Prot / AAB40713
  ref <309>: DATABASE ENTRY DATE: 2001-10-16

SEQ ID NO: 13762 - DNA, 1962 bp, Homo sapiens
  ref <308>: DATABASE ACCESSION NUMBER: EMBL / M90814
  ref <309>: DATABASE ENTRY DATE: 1999-07-02
gaattccgatccccagcccgcccgcccgcgctctccggcccgtcgcctgccttgggactcgcgagcccgcactcccgccctgcctgttcgctgcccgagtatggagctgctgtgttgcgaaggcacccggcacgcgccccgggccgggccggacccgcggctgctgggggaccagcgtgtcctgcagagcctgctccgcctggaggagcgctacgtaccccgcgcctcctacttccagtgcgtgcagcgggagatcaagccgcacatgcggaagatgctggcttactggatgctggaggtatgtgaggagcagcgctgtgaggaggaagtcttccccctggccatgaactacctggatcgctacctgtcttgcgtccccacccgaaaggcgcagttgcagctcctgggtgcggtctgcatgctgctggcctccaagctgcgcgagaccacgcccctgaccatcgaaaaactgtgcatctacaccgaccacgctgtctctccccgccagttgcgggactgggaggtgctggtcctagggaagctcaagtgggacctggctgctgtgattgcacatgatttcctggccttcattctgcaccggctctctctgccccgtgaccgacaggccttggtcaaaaagcatgcccagacctttttggccctctgtgctacagattatacctttgccatgtacccgccatccatgatcgccacgggcagcattggggctgcagtgcaaggcctgggtgcctgctccatgtccggggatgagctcacagagctgctggcagggatcactggcactgaagtggactgcctgcgggcctgtcaggagcagatcgaagctgcactcagggagagcctcagggaagccgctcagaccagctccagcccagcgcccaaagccccccggggctccagcagccaagggcccagccagaccagcactcctacagatgtcacagccatacacctgtagccctggagaggccctctggagtggccactaagcagaggaggggccgctgcacccacctccctgcctccaggaaccacaccacatctaagcctgaaggggcgtctgttcccccttcacaaagcccaagggatctggtcctacccatccccgcagtgtgcactaaggggcccggccagccatgtctgcatttcggtggctagtcaagctcctcctccctgcatctgaccagcagcgcctttcccaactctagctgggggtgggccaggctgatgggacagaattggatacatacaccagcattccttttgaacgcccccccccacccctgggggctctcatgttttcaactgccaaaatgctctagtgccttctaaaggtgttgtcccttctagggttattgcatttggattggggtccctctaaaatttaatgcatgatagacacatatgagggggaatagtctagatggctcctctcagtactttggaggcccctatgtagtccgtgctgacagctgctcctagagggaggggcctaggctcagccagagaagctataaattcctctttgctttgctttctgctcagcttctcctgtgtgattgacagctttgctgctgaaggctcattttaatttattaattgctttgagcacaactttaagaggacgtaatggggtcctggccatcccacaagtggtggtaaccctggtggttgctgttttcctcccttctgctactggcaaaaggatctttgtggccaaggagctgctatagcctggggtggggtcatgccctcctctcccattgtccctctgccccatcctccagcagggaaaatgcagcagggatgccctggaggtgctgagcccctgtctagagagggaggcaagcctgttgacacaggtctttcctaaggctgcaaggtttaggctggtggcccaggaccatcatcctactgtaataaagatgattgtgggaattc

SEQ ID NO: 13763 - protein, 292 aa, Homo sapiens; identical to SEQ ID NO: 1788
  ref <308>: DATABASE ACCESSION NUMBER: SWISS-Prot / AAA51927
  ref <309>: DATABASE ENTRY DATE: 2002-06-15

SEQ ID NO: 13764 - DNA, 3325 bp, Rattus norvegicus; identical to SEQ ID NO: 13760
  misc_feature (1)..(3325): n=a, c, g or t
  ref <308>: DATABASE ACCESSION NUMBER: EMBL / U49935
  ref <309>: DATABASE ENTRY DATE: 2000-03-04

SEQ ID NO: 13765 - protein, 293 aa, Rattus norvegicus; identical to SEQ ID NO: 1786
  ref <308>: DATABASE ACCESSION NUMBER: SWISS-Prot / AAB40713
  ref <309>: DATABASE ENTRY DATE: 2001-10-16

SEQ ID NO: 13766 - DNA, 1962 bp, Homo sapiens; identical to SEQ ID NO: 13762
  ref <308>: DATABASE ACCESSION NUMBER: EMBL / M90814
  ref <309>: DATABASE ENTRY DATE: 1999-07-02

SEQ ID NO: 13767 - protein, 292 aa, Homo sapiens; identical to SEQ ID NO: 1788
  ref <308>: DATABASE ACCESSION NUMBER: SWISS-Prot / AAA51927
  ref <309>: DATABASE ENTRY DATE: 2002-06-15

SEQ ID NO: 13768 - DNA, 2490 bp, Rattus norvegicus
  ref <308>: DATABASE ACCESSION NUMBER: EMBL / U50717
  ref <309>: DATABASE ENTRY DATE: 2000-03-04
atgttctttgcatgttattgtgcactccggactaacgtgaagaagtatcgataccaagatgaggacggtccacatgatcattccttacctcggctaactcatgaagtaagaggtccagaactggtgcatgtgtcggaaaagaacctctctcaaatagaaaatgtccacggatatgtcttacagtctcacatttctcctctgaaggctagccctgctcctataattgtcaacacagacactttggacactattccttatgtcaatggaacagaaattgaatatgaatttgaagaaattacattggagaggggaaattcaggtctgggattcagtattgctggagggacagataatcctcacattggagatgaccctggcatatttattacgaagattattccaggaggtgctgcagcagaggatggcagactcagggtcaacgattgtatcttgcgggtgaatgaagttgatgtgtcggaggtttcccacagtaaagcagtggaggccctcaaggaagcaggctctattgttcgactgtatatacttagaagacgacccatcctggagactgttgtggaaatcaaacttttcaaagggccaaaaggtttaggcttcagtattgctggaggggtggggaaccagcacatacccggagacaacagcatttatgtaacgaaaattatggatggtggagctgcacagaaagatgggaggttgcaagtaggagacagactgctaatggtaaataactatagtttagaagaagttacacatgaagaggctgtagcgatattgaaaaatacatctgatgttgtttatctaaaagttggcaaacccacaaccatttatatgactgatccttatgggccaccggatatcactcactcttattctccaccaatggaaaatcatctactgtctggtaacaatggcacgttagaatacaaaacatccctgccgcccatctctccagggaagtactcaccaattccaaagcacatgctggttgaagatgactacacaaggcctccggaacctgtttacagcactgtgaataaactgtgtgataaacctgcttctcccaggcactattcccctgttgagtgtgacaaaagcttccttctctcaactccttacccccactaccacctaggcctgctccctgactctgacatgaccagtcattctcagcacagtactgcaactcgtcagccctcagtgactctccaacgggccatctccctggaaggggagccccgaaaggtggtccttcacaaaggctccactggcctgggcttcaacattgtgggtggagaagacggagaaggtatttttgtatccttcatagcagacctgagtggggagctccagagaagaaaacagattttatcggtgaatggtatccatctcccaggagactctcatgaacaggcacttcccctgaagggggcggggcagacagtgacaatcatagcacaatatcaacctgaagattactctcgattcgaggccaaaatccatgacctacgagagcagatgatgaaccacagcatgagttccgggtccgggtcccttcgaaccaatcagaaacgctccctgtatgtcagagccatgtttgactatgacaagagcaaggacagtggactgcctagccaaggacttagttttaaatatggagacatccttaatgtcatcaatgcctctgatgatgagtggtggcaagccagaagggtcatacaagatggggacagcgaggagatgggagtcattcccagcaaacggagggtggaaagaaaggagcgtgcccgattgaagacagtgaagttcaatgcaaaacctggtgtgattgattccaaacgaggacaagaagatctcattctttcctatgaacctgtcacgaggcaggaaataaactacacccgaccagtgattatcctgggccccatgaaggatcgaatcaatgatgacttgatatctgaatttcctgataaatttggctcctgtgtgcctcatactacgaggccaaagcgtgactacgaagtcgacggcagagactatcactttgtcatttctagagaacaaatggagaaagatatccaagagcacaaatttatagaagccggccagtactatgacaatttatatggaaccagtgtgcagtctgtgagatttgtagcagaaaggggcaaacactgtatacatgatgtatcgggaaatgctattaagcggttacaagttgcccagctctatcccattgctatcttcataaagcccaagtctctggaacctctgatggagatgaataacggtctaatggaggaacaagccaagaaaacctatgaccgggcaattaagctagaacaagaatttggagaatattttacagctattgtccaaggagataccttagaagatatttacaaccaatgcaagcttgttattgaagagcagtctggacctttcatctggattccctcaaaggagaagtta

SEQ ID NO: 13769 - protein, 852 aa, Rattus norvegicus
  ref <308>: DATABASE ACCESSION NUMBER: SWISS-Prot / AAC52643
  ref <309>: DATABASE ENTRY DATE: 2002-06-15
MFFACYCALRTNVKKYRYQDEDGPHDHSLPRLTHEVRGPELVHVSEKNLSQIENVHGYVLQSHISPLKASPAPIIVNTDTLDTIPYVNGTEIEYEFEEITLERGNSGLGFSIAGGTDNPHIGDDPGIFITKIIPGGAAAEDGRLRVNDCILRVNEVDVSEVSHSKAVEALKEAGSIVRLYVRRRRPILETVVEIKLFKGPKGLGFSIAGGVGNQHIPGDNSIYVTKIIDGGAAQKDGRLQVGDRLLMVNNYSLEEVTHEEAVAILKNTSDVVYLKVGKPTTIYMTDPYGPPDITHSYSPPMENHLLSGNNGTLEYKTSLPPISPGRYSPIPKHMLVEDDYTRPPEPVYSTVNKLCDKPASPRHYSPVECDKSFLLSTPYPHYHLGLLPDSDMTSHSQHSTATRQPSVTLQRAISLEGEPRKVVLHKGSTGLGFNIVGGEDGEGIFVSFILAGGPADLSGELQRGDQILSVNGIDLRGASHEQAAAALKGAGQTVTIIAQYQPEDYARFEAKIHDLREQMMNHSMSSGSGSLRTNQKRSLYVRAMFDYDKSKDSGLPSQGLSFKYGDILHVINASDDEWWQARRVILDGDSEEMGVIPSKRRVERKERARLKTVKFNAKPGVIDSKGDIPGLGDDGYGTKTLRGQEDLILSYEPVTRQEINYTRPVIILGPMKDRINDDLISEFPDKFGSCVPHTTRPKRDYEVDGRDYHFVISREQMEKDIQEHKFIEAGQYNDNLYGTSVQSVRFVAERGKHCILDVSGNAIKRLQVAQLYPIAIFIKPKSLEPLMEMNKRLTEEQAKKTYDRAIKLEQEFGEYFTAIVQGDTLEDIYNQCKLVIEEQSGPFIWIPSKEKL

SEQ ID NO: 13770 - DNA, 1426 bp, Rattus norvegicus
  ref <308>: DATABASE ACCESSION NUMBER: EMBL / U55938
  ref <309>: DATABASE ENTRY DATE: 2000-03-04
ggcgctcaatggaccgatttccccggtttccctgaacccagcctagcccggaatgagaaattgcaaaatggcccgagtcgccagtatactagggctggtcatgctcagcgtggccctgctgattttatcgcttatcagctacgtgtccctgaaaaaggagaacatcttcaccactcccaagtacgccagcccgggggcgccccgaatgtacatgttccacgcgggattccggtcacagtttgcactgaagtttctagaaccgtcatttgtgcccattacgaattttctcacccatgaactccaagagaaaccttctaaatggacatttaatcggacagcgtttttacatcaaaggcaagaaattcttcagcatgtcgatgtaataaaaaatttttctttaaccaagaatagtgttcggatcggacaactgatacattacgattattccagccataaatatgttttctctattagcaataacttccggtccctgctcccagatgtgtcgcccattctgaataagcgttataacatttgtgctgtggtcggaaacagtggaatcttgacagggagtcagtgtggacaagaaatagataaatcggattttgtttttcggtgcaattttgccccgacagaggctttccacaaagatgttggaaagaaaaccaacctcacaactttcaatcctagcatcttggaaaaatattacaacaaccttttaaccatccaggaccgtaacaacttcttcctcagtttaaaaaagctcgacggggccattctctggatccccgcatttttcttccacacttctgcgactgtaaccagaaccttagtggattttttcgttgagcacagaggtcagttaaaggtccagttggcttggcctggaaatatcatgcaacatgtcaacaggtactggaaaaacaaacacttgtcacccaaacgactgagcacaggtttcctaatgtacacccttgcatctgcaatatgtgaagagatccacttgtacggtttctggcctttcggatttgaccccaacaccagggaggatctgccctaccactactatgacaaaaaaggaaccaaatttaccaccaagtggcaggagtctcaccagctgcctgctgagtttcagctgctctatcgaatgcatggggaagggctcacaaagctcactctgtcacactgtgcctaagaactccaaatggaaagtgccaaatggctgtttaaaaagtgcccccaaaccaaattgaatagtctccagaacagaacccatagacaatctggcaaagcctgtctgccacttacaaggaaagatatcttctcttcctcttttgcactgctctttgaatggtccgaacagacttaggacaggtgcattgaagccgtttcttttagacttgactgggaaaaggttatattgcat

SEQ ID NO: 13771 - protein, 380 aa, Rattus norvegicus
  ref <308>: DATABASE ACCESSION NUMBER: SWISS-Prot / AAB50061
  ref <309>: DATABASE ENTRY DATE: 2003-02-01
MRNCKMARVASILGLVMLSVALLILSLISYVSLKKENIFTTPKYASPGAPRMYMFHAGFRSQFALKFLEPSFVPITNFLTHELQEKPSKWTFNRTAFLHQRQEILQHVDVIKNFSLTKNSVRIGQLIHYDYSSHKYVFSISNNFRSLLPDVSPILNKRYNICAVVGNSGILTGSQCGQEIDKSDFVFRCNFAPTEAFHKDVGKKTNLTTFNPSILEKYYNNLLTIQDRNNFFLSLKKLDGAILWIPAFFFHTSATVTRTLVDFFVEHRGQLKVQLAWPGNIMQHVNRYWKNKHLSPKRLSTGFLMYTLASAICEEIHLYGFWPFGFDPNTREDLPYHYYDKKGTKFTTKWQESHQLPAEFQLLYRMHGEGLTKLTLSHCA

SEQ ID NO: 13772 - DNA, 3490 bp, Homo sapiens
agatcttactccctttggcattttacaccttactcatacaatcatttttaaaaaatagcaatttaaaaaaatacagttcaagtgttcatcatatccaggcatgcaagccttttctaaatttttttaaataataaaaaagccccacagaggaaaggaggttatttgtgtcctcctgacacacacttttagattttggttaaaaagtctctagtgggtgcaaagtgaccccctttgtcactggaaacaaataggagcattctttgtgccactgtccacaaccacacagatatgtttcccaagggagctcatcaggtcttcaaacatttagcaagcatgacatgtgtaagagacagtattggagaagtaagacaagccttgctctgccgaagcttacaatccaggagctcaccccttcaaggaatttacagcctccagacagataataacattaggtccatgaaagcctacaaggcaagaagttcaggagagaaagaagtcataaccatcttggaagaatctcaacttgttttatcagaactcaaacgccaatttctcacccctagcttccctcattagcgcttattaactagtattgggaggaccaagcgaagagtaaagctagggtagcagaggccataagctaattgcaaaggacagagctaaagaaacatgctagtttcccctgagcacccaactgcatgactgaaaatggattaatttgtatttctaatggatatacaagaaacacgtgaatatgctaaaataaatttaaggtcaagcaatgcaaagtgttagtgcgtttgccttccactctcagaggcagcctctcttatttggttcttgggctgcttcataaaaagttctgtgttttttaatggcctcagcttttgggaggctcaggccacctagcccatcaggagaccaggcccgaaggatggatctgaagagtgggcaacggagagttaaaccagggctgacttcaacaggcccagtcaagtcaggggcaagcacattgtccatccactggaagacggaaaggggagaggaaggcaggccctcccgactcacaggtcacctcgcaactttgctaggcactacccaccctttagggataagtgaagtatgtggtgggcatacaaggcgcacaggggagtcattctggcaaattccaagaaggttttaagggctcccgaggcaggcaggcccagttgctgtttggagcttcctttggggtgggaggatggcgggggcagggggccggggcggtgccttaacgaggggagatgcttttaaatagctgccttccaaaaaccatcctccctgcttctttgagaagcacccagctgttgtttaccctccaggacagcaaatccggttatttgtctctctattccgtgatattataaagtaatgaatggtccattaaactaagtttgggatcccgtctccccacagccacctcctcgccggcaccctcagccggggaggccgtaggctcggctgcagcctggcagcctcagtccccctccctccaccatttccccctactccctccctctcctgcaccccctccccccggttatttgggagattagagttcattaattaaatcctgtgcttagatcgaactgtaacattattccaatcacatttatcttgcaggcggcggaggagatggcagcctcgctggaaacgcgcgggggagcctgagccggcggccggggacgcacggcgctgcgcgctccttcgccacgccgccgcgcagcccctccatcttcctgctcggcaccgggccccgcgcgcccctgcctacggggtcccgctgctctccggggctcctgccagccccaacccccggccccggtggcctccccccacccccgcccgggtccccctcctccgccacacgcgcgcgcgctcacacacacacacacacacacacacacatatatacacgccagcgagctgctggccgctcaatggaccgatttccccggtttccctgaacccagcccagcccgggatgagaaactgcaaaatggcccgggtcgccagtgtgctggggctggtcatgctcagcgtcgccctgctgattttatcgctcatcagctacgtgtccctgaaaaaggagaacatcttcaccactcccaagtacgccagcccgggggcgccccgaatgtacatgttccacgcgggattccggtcacaatttgcgctgaagtttctagacccgtcattcgtgcccattacgaattctctcacccaggaactccaagagaaaccttctaagtggacatttaatcggacagcgtttttacatcaaaggcaagaaattcttcagcatgtcgatgtaataaaaaatttttctttgaccaagaatagtgttcggattggacaactgatgcactatgattattccagccataaatatgttttctctattagcaataacttccggtcacttcttccagatgtgtcacccattatgaacaagcattataatatttgtgccgtggttggaaatagtgggatcctgacagggagccagtgtggacaagaaatagataaatcagattttgttttccgttgcaatttcgcccctacggaggctttccaaagagatgttggaagaaaaaccaatcttaccaccttcaaccccagcatcctggaaaaatattacaacaatctcttgactattcaggaccgtaacaactttttcctcagtttaaaaaagcttgacggggccattctttggatccctgcatttttcttccacacttcagcaactgtgaccaggacattagttgacttttttgttgaacacagaggtcagttaaaagtccaactggcttggccgggaaatataatgcaacatgtcaacaggtactggaaaaacaaacatttgtcacctaaacggctgagcacaggtattcttatgtacacccttgcatcagcaatatgtgaagagatccacttgtatggattttggccttttggatttgaccccaacacaagggaagatcttccataccattactatgacaaaaaaggaaccaaatttaccaccaagtggcaggagtcccaccagctgcctgctgagtttcagctgctgtaccgaatgcatggggaagggctcaccaagctgactctgtcacactgtgcctaagaactccaaacggaaagtgccaaatggctgtttaaaaagtgccccaaatcaaattgaatagccttcagaatagaaccctagagaatgtcttataaggattgtctgccatttaaaaggaaagatgtcttttctcttttgcactgctcttttaagagttttagcagatttagcaggacagatgcattgaagccacatggtttagacttgattgataaagggaatgttgcatttgggactatgctgctaacgaaatggtttgaagtattttcatgtttggattttaataataaactgcctctcatttttatgaggactagagctata

SEQ ID NO: 13773 - protein, 380 aa, Homo sapiens [sequence omitted]

SEQ ID NO: 13774 - DNA, 1250 bp, Rattus norvegicus
  ref <308>: DATABASE ACCESSION NUMBER: EMBL / U57049
  ref <309>: DATABASE ENTRY DATE: 2000-03-04
gccatggtgaacgaagccagaagaagtggaagccccagccccccttctgagggtagaagaagtggaagtgagagttccaaggacagttccagatgttccacccccagcctggacccggaccggaacgagagactgcgggagaagatgagacgaagaatggactctgaagacaagtggttctccctggagttctcccctcctcggacaggtgagggagcttttacctcatctcgaggtttgaccggttggggggagggggcccctccttcgtggatgttacctggtacccaggtggcgtcctggctcagacaaggagacctcatctatgataattgccagcacagcactgaactactgtggcttggaaaccatcctgcacatgacctgctgccagcagcgccaggaggagatctcaggccacctgcacagagccaagcagctcggcctgaagaatataatggcgctgaggggagaccctgtaggtgaccactgggaagcagaggaaggaggcttcagctatgccacagacctggtgaagcacatccggaacgagtttggagactattttgacatctgtgtggcaggttaccccaaaggccacccggatgcagagagcttcgaggatgacctgaagcacctgaaggagaaggtatcagcaggcgccgactttatcatcactcagctcttctttgagggacgctccttcttcagcttcgtgaaggcctgcgaagacataggcatctcctgccctatcctgcctgggatcttccctatccagggctacacctcccttcggcagcttgtaaaactgtccaagctggaggtaccacagacgatcaaggatgtgatcgagccgatcaaagacaacgatgctgccatccgcaaccacggcattgagctggctgtgaacttgtgccgggaactgctggacagtggcttggtgccgggcctccacttctacactatcaaccgcgaggtggcgaccatggaaagtgctgaagcaactgggcatgtggaccgaggaccccaggcgtcccctgccctgggctggcagtgcgcaccccaaacgcagggaggaagatgtgcgtcccatcttctgggcctcacgaccaaaaagctacatctaccgcacacagggctgggatgagtttcccaatggccgctggggtaattcttcctcaccagccttcggggagctgaaagactactacctcttctacctgaaaagcaagtcccccaaggaggaactt

SEQ ID NO: 13775 - protein, 161 aa, Rattus norvegicus
  ref <308>: DATABASE ACCESSION NUMBER: SWISS-Prot / AAB01988
  ref <309>: DATABASE ENTRY DATE: 2002-06-01
AMVNEARRSGSPSPPSEGRRSGSESSKDSSRCSTPSLDPDRNERLREKMRRRMDSEDKWFSLEFSPPRTGEGAFTSSRGLTGWGEGAPPSWMLPGTQVASWLRQGDLIYDNCQHSTELLWLGNHPAHDLLPAAPGGDLRPPAQSQAARPEEYNGAEGRPCR

SEQ ID NO: 13776 - DNA, 1004 bp, Rattus norvegicus
  ref <308>: DATABASE ACCESSION NUMBER: EMBL / U62667
  ref <309>: DATABASE ENTRY DATE: 2000-03-04
aagctttcagtatatccagatccacatcttcactcaagccgggagagggaaagaggaaagggggggaggaaaaaaaaaagccaacaacttagcggaaacttctcagagaatgctccaaaactcagcagtgattctggcgctggtcatcagtgctgctgcagctcacgaggcggaacagaatgattctgtgagccccagaaaatcccgggtggcggctcaaaattcagctgaagtggtccgctgcctcaacagtgccctacaggttggctgtggggcttttgcatgcctggaaaactccacatgtgacacagatgggatgtacgacatttgtaaatccttcttgtacagtgctgctaaatttgacactcagggaaaagcatttgtcaaagagagcttaaagtgcatcgccaatgggatcacctccaaggtcttccttgccattcggaggtgttctactttccagaggatgatcgccgaggtgcaggaggactgctacagcaagctcaatgtttgcagcattgccaagcgcaacccggaagccatcactgaagtcatacagctgcccaatcacttctccaacagatactacaacagacttgtccgaagccttctggaatgtgatgaagatacggtcagcacaatcagagacagcctgatggagaagatcgggcccaacatggccagcctcttccatatcctgcagacagaccactgtgcccagacacatcccagagctgacttcaataggaggcgcacaaatgagccacagaagctgaaagtcctcctcaggaacctccgaggtgagggggattctccctcacacatcaaacgcacctcccaagagaatgcgtaagcagggagaggtattcacagcctcaccaaactaatagcgttttaggggtgtttacacaccaactttgagtgtactgtgcctggtttgatttttttttaagtagtacctattttctatccccccttaaagaaaactgcatgaaactaagctt

SEQ ID NO: 13777 - protein, 247 aa, Rattus norvegicus [sequence omitted]

SEQ ID NO: 13778 - DNA, 3901 bp, Homo sapiens
  ref <308>: DATABASE ACCESSION NUMBER: EMBL / U25997
  ref <309>: DATABASE ENTRY DATE: 2000-03-04
cagtttgcaaaagccagaggtgcaagaagcagcgactgcagcagcagcagcagcagcggcggtggcagcagcagcagcagcggcggcagcagcagcagcagcggaggcaccggtggcagcagcagcatcaccagcaacaacaacaaaaaaaaatcctcatcaaatcctcacctaagctttcagtgtatccagatccacatcttcactcaagccaggagagggaaagaggaaaggggggcaggaaaaaaaaaaaacccaacaacttagcggaaacttctcagagaatgctccaaaactcagcagtgcttctggtgctggtgatcagtgcttctgcaacccatgaggcggagcagaatgactctgtgagccccaggaaatcccgagtggcggctcaaaactcagctgaagtggttcgttgcctcaacagtgctctacaggtcggctgcggggcttttgcatgcctggaaaactccacctgtgacacagatgggatgtatgacatctgtaaatccttcttgtacagcgctgctaaatttgacactcagggaaaagcattcgtcaaagagagcttaaaatgcatcgccaacggggtcacctccaaggtcttcctcgccattcggaggtgctccactttccaaaggatgattgctgaggtgcaggaagagtgctacagcaagctgaatgtgtgcagcatcgccaagcggaaccctgaagccatcactgaggtcgtccagctgcccaatcacttctccaacagatactataacagacttgtccgaagcctgctggaatgtgatgaagacacagtcagcacaatcagagacagcctgatggagaaaattgggcctaacatggccagcctcttccacatcctgcagacagaccactgtgcccaaacacacccacgagctgacttcaacaggagacgcaccaatgagccgcagaagctgaaagtcctcctcaggaacctccgaggtgaggaggactctccctcccacatcaaacgcacatcccatgagagtgcataaccagggagaggttattcacaacctcaccaaactagtatcattttaggggtgttgacacaccaattttgagtgtactgtgcctggtttgatttttttaaagtagttcctattttctatcccccttaaagaaaattgcatgaaactaggcttctgtaatcaatatcccaacattctgcaatggcagcattcccaccaacaaaatccatgtgatcattctgcctctcctcaggagaaagtaccctcttttaccaacttcctctgccatgtcttttcccctgctcccctgagaccacccccaaacacaaaacattcatgtaactctccagccattgtaatttgaagatgtggatccctttagaacggttgccccagtagagttagctgataaggaaactttatttaaatgcatgtcttaaatgctcataaagatgttaaatggaattcgtgttatgaatctgtgctggccatggacgaatatgaatgtcacatttgaattcttgatctctaatgagctagtgtcttatggtcttgatcctccaatgtctaattttctttccgacacatttaccaaattgcttgagcctggctgtccaaccagactttgagcctgcatcttcttgcatctaatgaaaaacaaaaagctaacatctttacgtactgtaactgctcagagctttaaaagtatctttaacaattgtcttaaaaccagagaatcttaaggtctaactgtggaatataaatagctgaaaactaatgtactgtacataaattccagaggactctgcttaaacaaagcagtatataataactttattgcatatagatttagttttgtaacttagctttatttttcttttcctgggaatggaataactatctcacttccagatatccacataaatgctccttgtggccttttttataactaagggggtagaagtagttttaattcaacatcaaaacttaagatgggcctgtatgagacaggaaaaaccaacaggtttatctgaaggaccccaggtaagatgttaatctcccagcccacctcaacccagaggctactcttgacttagacctatactgaaagatctctgtcacatccaactggaaattccaggaaccaaaaagagcatccctatgggcttggaccacttacagtgtgataaggcctactatacattaggaagtggtagttctttactcgtcccctttcatcggtgcctggtactctggcaaatgatgatggggtgggagactttccattaaatcaatcaggaatgagtcaatcagcctttaggtctttagtccgggggacttggggctgagagagtataaataaccctgggctgtccagccttaatagacttctcttacattttcgtcctgtagcacgctgcctgccaaagtagtcctggcagctggaccatctctgtaggatcgtaaaaaaatagaaaaaaagaaaaaaaaaagaaagaaagagggaaaaagagctggtggtttgatcatttctgccatgatgtttacaagatggcgaccaccaaagtcaaacgactaacctatctatgaacaacagtagtttctcagggtcactgtccttgaacccaacagtcccttatgagcgtcactgcccaccaaaggtcaatgtcaagagaggaagagagggaggaggggtaggactgcaggggccactccaaactcgcttaggtagaaactattggtgctcgactctcactaggctaaactcaagatttgaccaaatcgagtgatagggatcctggtgggaggagagagggcacatctccagaaaaatgaaaagcaatacaactttaccataaagcctttaaaaccagtaacgtgctgctcaaggaccaagagcaattgcagcagacccagcagcagcagcagcagcacaaacattgctgcctttgtccccacacagcctctaagcgtgctgacatcagattgttaagggcatttttatactcagaactgtcccatccccaggtccccaaacttatggacactgccttagcctcttggaaatcaggtagaccatattctaagttagactcttcccctccctcccacacttcccacccccaggcaaggctgacttctctgaatcagaaaagctattaaagtttgtgtgttgtgtccattttgcaaacccaactaagccaggaccccaatgcgacaagtagttcatgagtattcctagcaaatttctctctttcttcagttcagtagatttccttttttcttttcttttttttttttttttttttttggctgtgacctcttcaaaccgtggtacccccccttttctccccacgatgatatctatatatgtatctacaatacatatatctacacatacagaaagaagcagttctcacatgttgctagttttttgcttctctttcccccaccctactccctccaattccccccttaaacttccaaagcttcgtcttgtgtttgctgcagagtgattcgggggctgacctagaccagtttgcatgattcttctcttgtgatttggttgcactttagacatttttgtgccattatatttgcattatgtatttataatttaaatgatatttaggtttttggctgagtactggaataaacagtgagcatatctggtatatgtcattatttattgttaaattacattttttaagctccatgtgcatataaaggttatgaaacatatcatggtaatgacagatgcaagttattttatttgcttattttttataattaaagatgccatagcataatatgaagcctttggtgaattccttctaagataaaaataataataaagtgttacgttttattggtttcaaaaaaaaaaaaaaaaaaaa

SEQ ID NO: 13779 - protein, 247 aa, Homo sapiens
  ref <308>: DATABASE ACCESSION NUMBER: SWISS-Prot / P52823
  ref <309>: DATABASE ENTRY DATE: 2002-06-15
MLQNSAVLLVLVISASATHEAEQNDSVSPRKSRVAAQNSAEVVRCLNSALQVGCGAFACLENSTCDTDGMYDICKSFLYSAAKFDTQGKAFVKESLKCIANGVTSKVFLAIRRCSTFQRMIAEVQEECYSKLNVCSIAKRNPEAITEVVQLPNHFSNRYYNRLVRSLLECDEDTVSTIRDSLMEKIGPNMASLFHILQTDHCAQTHPRADFNRRRTNEPQKLKVLLRNLRGEEDSPSHIKRTSHESA

SEQ ID NO: 13780 - DNA, 4189 bp, Rattus norvegicus; identical to SEQ ID NO: 8778
  ref <308>: DATABASE ACCESSION NUMBER: EMBL / U65007
  ref <309>: DATABASE ENTRY DATE: 1996-11-22

SEQ ID NO: 13781 - protein, 1383 aa, Rattus norvegicus
  misc_feature (1)..(1383): Xaa=Unknown amino acid
MKAPTALAPGILLLLLTLAQRSHGECKEALVKSEMNVNMKYQLPNFTAETPIQNVVLHGHHIYLGATNYIYVLNDKDLQKVSEFKTGPVVEHPDCFPCQDCSSKANVSGGVWKDNVNMALLVDTYYDDQLISCGSVNRGTCQRHVLPPDNAADIQSEVHCMFSPLAEEESGQCPDCVVSALGAKVLLSEKDRFINFFVGNTINSSYPPDYSLHSISVRRLKETQDGFKFLTDQSYIDVLGEFRDSYPIKYIHAFESNHFIYFLTVQKETLDAQTFHTRIIRFCSVDSGLHSYMEMPLECILTEKRRKRSTREEVFNILQAAYVSKPGANLAKQIGASPYDDILYGVFAQSKPDSAEPMNRSAVCAFPIKYVNDFFNKIVNKNNVRCLQHFYGPNHEHCFNRTLLRNSSGCEVRSDEYRTEFTTALQAVDLFMGRLNHVLLTSISTFIKGDLTIANLGTSEGRFMQVVLSRTAHFTPHVNFLLDSHPVSPEVIVEHPSNQNGYTLVVTGKKITKIPLNGLGCGHFQSCSQCLSAPYFIQCGWCHNRCVHSNECPSGTWTQEICLPAVYKVFPTSAPLEGGTMLTICGWDFGFKKNNKFDLRKTKVLLGNESCTLTLSESTTNTLKCTVGPAMSEHFNVSVIVSNSRETTQYSAFSYVDPVITSISPRYGPHAGGTLLTLTGKYLNSGNSRHISIGGKTCTLKSVSDSILECYTPGHTVSAEFPVKLKIDLADRVTSSFSYGEDPFVSEIHPTKSFISGGSTITGIGKNLNSVSTPKLVIEVHDVGVNYTVACQHRSSSEIICCTTPSLQQLDLQLPLKTKAFFLLDGILSKHFDLTYVHDPMFKPFEKPVMISMGNENVVEIKGDDIDPEAVKGEVLKVGNKSCENLHWHSEALLCTVPSDLLKLNGGELNIEWKQAVSSTVLGKVIVQPDQNFAGLIIGAVSISVVVLLVSGLFLWLRKRKHKDLGSELVRYDARVHTPHLDRLVSARSVSPTTEMVSNESVDYRATFPEDQFPNSSQNGACRQVQYPLTDLSPILTSGDSDISSPLLQNTVHIDLSALNPELVQAVQHVVIGPSSLIVHFNEVIGRGHFGCVYHGTLLDSDGKKIHCAVKSLNRITDIEEVSQFLTEGIIMKDFSHPNVLSLLGICLRSEGSPLVVLPYMKHGDLRNFIRNETHNPTVKDLIGFGLQVAKGMKYLASKKFVHRDLAARNCMLDEKFTVKVADFGLARDMYDKEYYSVHNKTGAKLPVKWMALESLQTQKFTTKSDVWSFGVLLWELMTRGAPPYPDVNTFDITIYLLQGRRLLQPEYCPDALYEVMLKCWHPKAEMRPSFSELVSRISSIFSTFIGEHYVHVNATYVNVKCVAPYPSLLPSQDNIDGEANTX

SEQ ID NO: 13782 - DNA, 519 bp, Homo sapiens
  ref <308>: DATABASE ACCESSION NUMBER: EMBL / M15326
  ref <309>: DATABASE ENTRY DATE: 2000-03-04
tgaagcagttaatggtaagaagtttcctttggtgcccaggcaggtggctgacgcctgtaatcccagcattgggaggctgaggtgggtggatcatgaggtcaggagtccaagagcagcctggccaagatggtgaaaccccgtctctactaaaaataacagaaattagccagtcatggtggcacgcacctgtaatcccagctactttgtaggctgaggcagagaattgcttaaacccaggagccggaggttgtagtgagccaagattgcgtcactggactccagcctgggcgacagagccagactccgtatcaaaaaaaaaaaaaaaaaaaaaaggttttttgggttcttttttttttaatggtttttgaaatttttttatttctataaaagaaaggagttttcagatatttatatcattatacaataatattccattagttaagtatactttcccagtctcacaagagttccttcaaaatacttgagtgtgttgatcaacaagtggtgagttacaactaa

SEQ ID NO: 13783 - protein, 1390 aa, Homo sapiens [sequence omitted]

SEQ ID NO: 13784 - DNA, 3348 bp, Rattus norvegicus; identical to SEQ ID NO: 8818
  ref <308>: DATABASE ACCESSION NUMBER: EMBL / U67140
  ref <309>: DATABASE ENTRY DATE: 2000-09-30

SEQ ID NO: 13785 - protein, 992 aa, Rattus norvegicus; identical to SEQ ID NO: 8819
  ref <308>: DATABASE ACCESSION NUMBER: SWISS-Prot / AAB48590
  ref <309>: DATABASE ENTRY DATE: 2002-06-15

SEQ ID NO: 13786 - DNA, 3125 bp, Rattus norvegicus
  misc_feature (1)..(3125): n=a, c, g or t
  ref <308>: DATABASE ACCESSION NUMBER: EMBL / U68172
  ref <309>: DATABASE ENTRY DATE: 2000-03-04
tcaggaaccggtgtctctcataggctcctgtttgtggttttaccaactctgatgtagcatcctgattcctggaggcatttccagatactggggaggcagctacatatagttttgggctaagttcagggatggacagaagatcaccagggtcacccaaaggatcatgtcctttgagtaagagctgtggctaggaacacaggacaggctgcctgagcccacatatcctcgggagaagtgttagccctaggagactctgcagggacaggacctgctggagttggggctaacccctcttctcagactgcattctcacagagtggccactcaagctacttcctcttgtaccctggggacacgaatccaatgagagttgttgcctgggctgagggctgcccaagttttaattacatgtaattccagagactggcagagctgagaaaataaggggattagagagtagtcttagctgggctcagttgagtacagcaggctccatggagacaggtggcccccggttccccactgctccttgccttctggatcacgaaatgggtcaggcaccccctccctctggagtcttggtttcctgacactctttctttgtcttccccagatgatgtgaagtgaggtgcattaggaatatggttgcctcagcgccacagcttgtggagagatagaatggagccggggacacctgaaaactccgtattctaggctgtgttggagcttgcaggctgagcctgggagcattgttggcggaggtttgggggctatggcagactttgtgggatgtaattccagcaggcatctcctgctctcccacctgacagtggcctggcttgtagcttaaaggaatggagttcgcttggggtgtgtgctggcattgggataattggggctatgacatcctgaggaaggccaagtttacccagggagtcatataaagataaactcagataacttgaatcaatatttcctctctgggacctgtggagcccccacagctgtcttcctgataactcgcaaatgccccacccacccttcgcacctccctcgtcctccgccctcggggcctgctaggcatataagtcctgacccctgtcctgggatgctcttctgtgccaccctcgtgagccaccatggggctgccactagctcgcctggtggctgtgtgcctagtcctggccttagccaagggcttggaacttcagaaaggtaaggggctgggtactctgggtaaagggacgggcagaaacccctgagggtgggaaggcagttcagagcaattagcaaggggcttctggaataggagagggtccccagtcagagcactgcagtgggactggtcttaaggcttgtaccaccactctgaggttgaaaactgaggctcctgcaccaggtgggtgagaagcggggatccctgagggaccattgtccgtggtagtggggaagcattggatgtccagaagaagccaagcttaggatggcttcagggggacctttggcaagacagtgtctctggagaatgggctgagtgttcatatgtgacacttctgtcccatcaggataaagctgtagatgggggatgtcccagggggaactcttgaagactgagcttcttgctgggtgaagagtgtgtggagaggggctaaatggagcatcagttgagaggtttgaggtagacagagcgaccacattgcctgaagatccctctaccctctccctgcttggactccaccttgtctgagagtctctgcagaggggtgacgaatatttaacagagactgtgcctatagggggaaccagaaaccctggttcggggccccagatggttggctcttggggggacctctgaggttaacttggagggtgggctcagggaagccctcctctcatctggatgtctcactgtgtccccactgttctcccagaagccagatcccgaaaccatgtctgcagcacctggggtgacttccactacaaaacttttgacggcgatgtcttccgattccctggtctctgtgattacaactttgcttctgactgccgagactcctataaggaatttgctgtgcacctgaagcggggcttggacaaggctgggggtcactccagcatagagtccgtcctgatcaccattaaggatgacaccatctacctcacccacaagctggcagttgtgaatggggccatgtgagtgggattactactcttctcttatgtcccagcagctagggggatgtttctggctcctcagagcaactttccccctgaacattttgtataacttagccagcctccaggataccctcttcctctctggtacatgtctaagtttgaggtttgagctaggccatggatttattcaacaaaccctgaggagatcccctctgtagacctcgannnnnnaggccatgtaaggagtcagcctgggactgacttcacccagataatgcccatggcctcagcaccgtatggacagcagaaccctcatgaggacaagtgggtgggttctgggatgatggattggtgagtgaccccatagtggctccacagggtcagcaccccacactacagctccgggctgctcattgagaagaacgatgcttataccaaggtctactcccgtgctggcctctccctcatgtggaaccgggaagatgccctgatggtgggtaccagcatcctgggctctggggtggtaggactcctctgtctggctagaggcctggtggctccatagaagggcagaagggtgggagacccatacctcatgattggagtaggatcctgtgtggcagagaaggttgctggagatggtgattagtaccagagactccactatcctatcctgtcctgagagaggctctgctctctgtgttataggtgcagtgagctgtctctaagtgtccttcagagatggccattttggtactctacgctgaagtacctttctagtggctgacccctaccttcttcccaaactgccctgtttgaaaagctgcctagacttaggggctctctggaagatcgatgactgggctctgaggtctgctcacctgccttacccttcattcataaccaacagtcggaagctggacgaccggttccagaaccacacctag

SEQ ID NO: 13787 - protein, 162 aa, Rattus norvegicus
  ref <308>: DATABASE ACCESSION NUMBER: SWISS-Prot / AAB08481
  ref <309>: DATABASE ENTRY DATE: 2002-03-01
MGLPLARLVAVCLVLALAKGLELQKEARSRNHVCSTWGDFHYKTFDGDVFRFPGLCDYNFASDCRDSYKEFAVHLKRGLDKAGGHSSIESVLITIKDDTIYLTHKLAVVNGAMVSTPHYSSGLLIEKNDAYTKVYSRAGLSLMWNREDALMVAGRPVPEPHL

SEQ ID NO: 13788 - DNA, 15720 bp, Homo sapiens; identical to SEQ ID NO: 10429
  ref <308>: DATABASE ACCESSION NUMBER: Refseq / NM_002457
  ref <309>: DATABASE ENTRY DATE: 2002-08-27

SEQ ID NO: 13789 - protein, 5179 aa, Homo sapiens; identical to SEQ ID NO: 10430
  ref <308>: DATABASE ACCESSION NUMBER: Refseq / NP_002448
  ref <309>: DATABASE ENTRY DATE: 2002-08-27

SEQ ID NO: 13790 - DNA, 3244 bp, Rattus norvegicus
  ref <308>: DATABASE ACCESSION NUMBER: EMBL / U70372
  ref <309>: DATABASE ENTRY DATE: 1999-09-09
ccgcttccggtgtcatggcagcctgaggtcccgggagtcggtgcgggcgctgcaggcccctccctgcggagccgcgggtccgggcggggatgtgacggcgggcgccgcgggcctgcctggcgcatcgtgtcggctcgcgtgtcctcgccccagcccgcaccatggccgggtccggctgcgcgtggggcgccgagccgccgcgcttcctggaggccttcgggcggctgtggcaggtacagagccgcctaggcagcggctcctcggcctcggtgtaccgggtgcgctgctgcggcactccaggctcgccccccggcgccctcaagcagttcctgcctccgggaaccaccggggctgccgcctcggctgcggagtatggtttccgaaaagagagggcagcgctggagcagttgcagggtcacaggaacatcgtgactttatacggagtctttaccatacacttctctccaaatgtgccatcacgctgtctgttgcttgaactcctggatgtcagcgtttcggaattgcttgtatattccagtcaccagggttgctccatgtggatgatccagcactgtgccagagatgtcctggaggcccttgcttttcttcaccatgagggctatgtccatgcagacctcaagccacgaaacatcctgtggagtgcggagaacgagtgctttaagcttattgactttggactcagcttcaaagaaggcaatcaggacgtgaagtatattcagacagacgggtatcgagctcctgaagcagaactgcagaattgcttggcccaggccggcctgcagagtgatacagagtgtacctcagctgttgatctctggagccttggaatcattttactggaaatgttctcaggaatgaaactgaaacatacagtcagatctcaggagtggaaggcaaacagttctgctattattgatcatatatttgccagtaaagcagtggtgaatgccgcaattccagcctatcacctcagagaccttatcaaaagcatgcttcatgacgacccaagcagaaggatccctgctgagatggccttgtgcagcccattctttagcattccttttgcccctcatattgaagatctggtgatgcttccaactccagtgctcagactcctcaatgtgctggatgatgactatcttgaaaatgaagatgaatatgaagatgttgtagaagatgtaaaagaagagtgtcagaaatatggaccagtggtttctctgcttgttccaaaggaaaatcctggcagaggacaagtctttgttgagtacgcaaacgctggagattccaaagctgctcagaaattgctgactgggaggatgtttgacgggaagtttgttgtggctacattctacccgctgagtgcctacaagaggggatatctttatcaaaccttgctttaatcagtaacctaaggactatttcctgtttctcctcttccatttcttggattattatattccacagctgaatgcaggagcaccctctccccattttaaagggtacttgtacatttattatcctaccaatgtgcagcctttgcccaaacagtgaccacattgcaaacacggcactgagtaggacaagacctctcagctatacattgagggggttagagcacccatgtgggcaccctttatttgtgcagtagggtgggtgctgctctttactatgtaacctaaaaagatgtcatttcatgtgctgatgaagcaaagatgagtcatttgtcatagtgaatattattaacaaatctgttagggctggtgacatcacagaatatttgtttgtattgtcaggtgtatctccttgttattctagctggcactgaatgctctaataatgttaagtcattgtcaagcaacagttacctaccgtgttcttaacaatgagttgtgaatttttctaaaggagtgctgtaggacttaatattcctctgaagaaactgcagtgagcctatcaatgtttttaaaattactattaaggcttttaaaatagaaagctgatgcttgatcttgcacaatttttatgtctagtatgtatgcttgagtgggtgtgcaagtgtgaaagactggagatgcctgagtcagtgtactttacagtgagtcttgtgagctaatacagtctgtaaccatttcctcctaccagttcacacttgagagacttgggctatgggtttcttgaaagttggtgtgacagatagaatgtaaatgacaaaagagttcattactgtaaaatgtagaacaaagtgtctagaccagggttccacgcaattcttcgaagtgactggaacaaagaaagtgtgggtacgtgtaagctaccccattctctacttcagacccaagactggctcatctcttttgtactgaacctcttgtgataattgtaacatttttccagatgtgattcttttctgctataatgaaattgaagtgggtcagaaaaaaaggtagatgcacagagacaggacaagagaaaggtgtagagaaggcagctaaccacggacgcttctccctgtctgccctgcctgccatcttgttctccttgcccttggctcttgccactgcagttggagggtttttgactggaagcgaggaaagaaaggctgacgggttttaaggtggaagtagaaaagaagaaaacgcagtgtctaagagaacaacagcagtccagtgtgtccttgatagaggccgcctgctggcatgagtttgtgggcacactgtgggttgaggagtgtgagcgtgcagtcttcctcttccgtagtggcgtacacttatgaaacgtttgtaaagcactggttatgcagataacccacaagttgtatatctgttacagaattttcctattcctgacctggatgaaaggttatttatttatttcccttaggaaagagtgtgtttcttttcctgctggcagcctgcttgtgtagtctcttgttcatactgttcaagttcctgagaacgccattaaaacttgcattttacaggatgaattattttacgctgattagacatttactgtccaacatttgttagcataatcaaatttttcagagctccctcttatgaagttaaatttggtataagggcctttaatgatgaattacatctgctcttatgtcatggtccctgatgtgtgtcttaggaagaaggcttttccaggggttcattgggcggttggttttcaagtcagacttgaggaacatagaatcaggactgtaaagtcctaa

SEQ ID NO: 13791 - protein, 419 aa, Rattus norvegicus
  ref <308>: DATABASE ACCESSION NUMBER: SWISS-Prot / AAC53031
  ref <309>: DATABASE ENTRY DATE: 2002-06-15
MAGSGCAWGAEPPRFLEAFGRLWQVQSRLGSGSSASVYRVRCCGTPGSPPGALKQFLPPGTTGAAASAAEYGFRKERAALEQLQGHRNIVTLYGVFTIHFSPNVPSRCLLLELLDVSVSELLVYSSHQGCSMWMIQHCARDVLEALAFLHHEGYVHADLKPRNILWSAENECFKLIDFGLSFKEGNQDVKYIQTDGYRAPEAELQNCLAQAGLQSDTECTSAVDLWSLGIILLEMFSGMKLKHTVRSQEWKANSSAIIDHIFASKAVVNAAIPAYHLRDLIKSMLHDDPSRRIPAEMALCSPFFSIPFAPHIEDLVMLPTPVLRLLNVLDDDYLENEDEYEDVVEDVKEECQKYGPVVSLLVPKENPGRGQVFVEYANAGDSKAAQKLLTGRMFDGKFVVATFYPLSAYKRGYLYQTLL

SEQ ID NO: 13792 - DNA, 1269 bp, Rattus norvegicus
  ref <308>: DATABASE ACCESSION NUMBER: EMBL / U70988
  ref <309>: DATABASE ENTRY DATE: 2000-03-04
ccatttacaaacttgaaggaaatagtgtgttccttgcatatacaagcaaatgggaaaatcctaataccccagtttcttgggggatagacaagaacttggggtgactttgccctaggtaccttcatctctcctctattgacaggattaagtttacctcaaagatgggagaaatcagggtggataatttcagccttgaagacttcttcagtggagatattgacagttacaattacagttctgacccgccctttactctgtcagatgctgccccatgcccctcagcgaacctagatatcaacaggtatgctgtggttgtcatatacgttctggtgactttgctgagtctcgtgggaaactccctggtgatgctggtcatcttgtacaatcgaagcacctgctctgtcaccgacgtctacctgctgaacctggccattgctgatctgttctttgcactgaccttgcctgtctgggctgcatctaaagtaaatggatggatttttggctcattcctgtgcaaggtattctcgttcctgcaggagattaccttctacagcagtgttctgttgctagcctgcatcagcatggaccgctacctggccatcgtccacgccacaagtacactgatccagaagagacacttggtcaagtttgtgtgcatcaccatgtggtttctctcactagttctgtccctgcccatcttcattcttcggactactgttaaggcaaacccttctaccgtagtctgctatgagaatataggtaataatacatccaagtggagggtggtactgcgcatcctgcctcagacctatggcttcctcctgccgctgctcatcatgctgttctgctatgggttcacactgcgcacgctctttaaggcccacatggggcagaagcaccgggccatgcgggtcatctttgctgtggtcctcgtcttcctgctctgctggcttccctacaacattgtcctgttcacagacaccctcatgagaaccaagctgatcaaggagacctgtgaacgccagaacgagattaacaaagctttggaagctactgagattcttggcttcctccacagctgtcttaaccccatcatctatgcctttattggccagaaatttcgccatggacttctcaagatcatggctaattatggccttgtcagcaaggagttcttagccaaggagggcaggccttcttttgttggctcttcttcagcgaacacctccactaccctctaagactgtttacttaaactgtggcccctct

SEQ ID NO: 13793 - protein, 359 aa, Rattus norvegicus
  ref <308>: DATABASE ACCESSION NUMBER: SWISS-Prot / AAC52961
  ref <309>: DATABASE ENTRY DATE: 2000-05-30
MGEIRVDNFSLEDFFSGDIDSYNYSSDPPFTLSDAAPCPSANLDINRYAVVVIYVLVTLLSLVGNSLVMLVILYNRSTCSVTDVYLLNLAIADLFFALTLPVWAASKVNGWIFGSFLCKVFSFLQEITFYSSVLLLACISMDRYLAIVHATSTLIQKRHLVKFVCITMWFLSLVLSLPIFILRTTVKANPSTVVCYENIGNNTSKWRVVLRILPQTYGFLLPLLIMLFCYGFTLRTLFKAHMGQKHRAMRVIFAVVLVFLLCWLPYNIVLFTDTLMRTKLIKETCERQNEINKALEATEILGFLHSCLNPIIYAFIGQKFRHGLLKIMANYGLVSKEFLAKEGRPSFVGSSSANTSTTL

SEQ ID NO: 13794 - DNA, 2856 bp, Homo sapiens
  ref <308>: DATABASE ACCESSION NUMBER: Refseq / NM_001557
  ref <309>: DATABASE ENTRY DATE: 2000-10-31
cattcagagacagaaggtggatagacaaatctccaccttcagactggtaggctcctccagaagccatcagacaggaagatgtgaaaatccccagcactcatcccagaatcactaagtggcacctgtcctgggccaaagtcccaggacagacctcattgttcctctgtgggaatacctccccaggagggcatcctggatttcccccttgcaacccaggtcagaagtttcatcgtcaaggttgtttcatcttttttttcctgtctaacagctctgactaccacccaaccttgaggcacagtgaagacatcggtggccactccaataacagcaggtcacagctgctcttctggaggtgtcctacaggtgaaaagcccagcgacccagtcaggatttaagtttacctcaaaaatggaagattttaacatggagagtgacagctttgaagatttctggaaaggtgaagatcttagtaattacagttacagctctaccctgcccccttttctactagatgccgccccatgtgaaccagaatccctggaaatcaacaagtattttgtggtcattatctatgccctggtattcctgctgagcctgctgggaaactccctcgtgatgctggtcatcttatacagcagggtcggccgctccgtcactgatgtctacctgctgaacctagccttggccgacctactctttgccctgaccttgcccatctgggccgcctccaaggtgaatggctggatttttggcacattcctgtgcaaggtggtctcactcctgaaggaagtcaacttctatagtggcatcctgctactggcctgcatcagtgtggaccgttacctggccattgtccatgccacacgcacactgacccagaagcgctacttggtcaaattcatatgtctcagcatctggggtctgtccttgctcctggccctgcctgtcttacttttccgaaggaccgtctactcatccaatgttagcccagcctgctatgaggacatgggcaacaatacagcaaactggcggatgctgttacggatcctgccccagtcctttggcttcatcgtgccactgctgatcatgctgttctgctacggattcaccctgcgtacgctgtttaaggcccacatggggcagaagcaccgggccatgcgggtcatctttgctgtcgtcctcatcttcctgctctgctggctgccctacaacctggtcctgctggcagacaccctcatgaggacccaggtgatccaggagacctgtgagcgccgcaatcacatcgaccgggctctggatgccaccgagattctgggcatccttcacagctgcctcaaccccctcatctacgccttcattggccagaagtttcgccatggactcctcaagattctagctatacatggcttgatcagcaaggactccctgcccaaagacagcaggccttcctttgttggctcttcttcagggcacacttccactactctctaagacctcctgcctaagtgcagcccgtggggttcctcccttctcttcacagtcacattccaagcctcatgtccactggttcttcttggtctcagtgtcaatgcagcccccattgtggtcacaggaagtagaggaggccacgttcttactagtttcccttgcatggtttagaaagcttgccctggtgcctcaccccttgccataattactatgtcatttgctggagctctgcccatcctgcccctgagcccatggcactctatgttctaagaagtgaaaatctacactccagtgagacagctctgcatactcattaggatggctagtatcaaaagaaagaaaatcaggctggccaacggggtgaaacctgtctctactaaaaatacaaaaaaaaaaaaaaattagccgggcgtggtggtgagtgcctgtaatcacagctacttgggaggctgagatgggagaatcacttgaacccgggagcagaggttgcagtgagccgagattgtgcccctgccatccagcctgagcgacagtgagactctgtctcagtccatgaagatgtagaggagaaactggaactctcgagcgttgctgggggggattgtaaaatggtgtgaccactgcagaagacagtatggcagctttcctcaaaacttcagacatagaattaacacatgatcctgcaattccacttataggaattgacccacaagaaatgaaagcagggacttgaacccatatttgtacaccaatattcatagcagcttattcacaagacccaaaaggcagaagcaacccaaatgttcatcaatgaatgaatgaatggctaagcaaaatgtgatatgtacctaacgaagtatccttcagcctgaaagaggaatgaagtactcatacatgttacaacacggacgaaccttgaaaactttatgctaagtgaaataagccagacatcaacagataaatagtttatgattccacctacatgaggtactgagagtgaacaaatttacagagacagaaagcagaacagtgattaccagggactgaggggaggggagcatgggaagtgacggtttaatgggcacagggtttatgtttaggatgttgaaaaagttctgcagataaacagtagtgatagttgtaccgcaatgtgacttaatgccactaaattgacacttaaaaatggtttaaatggtcaattttgttatgtatattttatatcaatttaaaaaaaaacctgagccccaaaaggtattttaatcaccaaggctgattaaaccaaggctagaaccacctgcctatattttttgttaaatgatttcattcaatatcttttttttaataaaccatttttacttgggtgtttat

SEQ ID NO: 13795 - protein, 360 aa, Homo sapiens
  ref <308>: DATABASE ACCESSION NUMBER: Refseq / NP_001548
  ref <309>: DATABASE ENTRY DATE: 2000-10-31
MEDFNMESDSFEDFWKGEDLSNYSYSSTLPPFLLDAAPCEPESLEINKYFVVIIYALVFLLSLLGNSLVMLVILYSRVGRSVTDVYLLNLALADLLFALTLPIWAASKVNGWIFGTFLCKVVSLLKEVNFYSGILLLACISVDRYLAIVHATRTLTQKRYLVKFICLSIWGLSLLLALPVLLFRRTVYSSNVSPACYEDMGNNTANWRMLLRILPQSFGFIVPLLIMLFCYGFTLRTLFKAHMGQKHRAMRVIFAVVLIFLLCWLPYNLVLLADTLMRTQVIQETCERRNHIDRALDATEILGILHSCLNPLIYAFIGQKFRHGLLKILAIHGLISKDSLPKDSRPSFVGSSSGHTSTTL

SEQ ID NO: 13796 - DNA, 1070 bp, Rattus norvegicus; identical to SEQ ID NO: 8860
  ref <308>: DATABASE ACCESSION NUMBER: EMBL / U72741
  ref <309>: DATABASE ENTRY DATE: 1997-09-12

SEQ ID NO: 13797 - protein, 354 aa, Rattus norvegicus; identical to SEQ ID NO: 8861
  ref <308>: DATABASE ACCESSION NUMBER: SWISS-Prot / P97840
  ref <309>: DATABASE ENTRY DATE: 2001-10-16

SEQ ID NO: 13798 - DNA, 1725 bp, Homo sapiens
  ref <308>: DATABASE ACCESSION NUMBER: EMBL / AB006782
  ref <309>: DATABASE ENTRY DATE: 2001-07-31
tttctttgttaagtcgttccctctacaaaggacttcctagtgggtgtgaaaggcagcggtggccacagaggcggcggagagatggccttcagcggttcccaggctccctacctgagtccagctgtccccttttctgggactattcaaggaggtctccaggacggacttcagatcactgtcaatgggaccgttctcagctccagtggaaccaggtttgctgtgaactttcagactggcttcagtggaaatgacattgccttccacttcaaccctcggtttgaagatggagggtacgtggtgtgcaacacgaggcagaacggaagctgggggcccgaggagaggaagacacacatgcctttccagaaggggatgccctttgacctctgcttcctggtgcagagctcagatttcaaggtgatggtgaacgggatcctcttcgtgcagtacttccaccgcgtgcccttccaccgtgtggacaccatctccgtcaatggctctgtgcagctgtcctacatcagcttccagaacccccgcacagtccctgttcagcctgccttctccacggtgccgttctcccagcctgtctgtttcccacccaggcccagggggcgcagacaaaaacctcccggcgtgtggcctgccaacccggctcccattacccagacagtcatccacacagtgcagagcgcccctggacagatgttctctactcccgccatcccacctatgatgtacccccaccccgcctatccgatgcctttcatcaccaccattctgggagggctgtacccatccaagtccatcctcctgtcaggcactgtcctgcccagtgctcagaggttccacatcaacctgtgctctgggaaccacatcgccttccacctgaacccccgttttgatgagaatgctgtggtccgcaacacccagatcgacaactcctgggggtctgaggagcgaagtctgccccgaaaaatgcccttcgtccgtggccagagcttctcagtgtggatcttgtgtgaagctcactgcctcaaggtggccgtggatggtcagcacctgtttgaatactaccatcgcctgaggaacctgcccaccatcaacagactggaagtggggggcgacatccagctgacccatgtgcagacataggcggcttcctggccctggggccgggggctggggtgtggggcagtctgggtcctctcatcatccccacttcccaggcccagcctttccaaccctgcctgggatctgggctttaatgcagaggccatgtccttgtctggtcctgcttctggctacagccaccctggaacggagaaggcagctgacggggattgccttcctcagccgcagcagcacctggggctccagctgctggaatcctaccatcccaggaggcaggcacagccagggagaggggaggagtgggcagtgaagatgaagccccatgctcagtcccctcccatcccccacgcagctccaccccagtcccaagccaccagctgtctgctcctggtgggaggtggcctcctcagcccctcctctctgacctttaacctcactctcaccttgcaccgtgcaccaacccttcacccctcctggaaagcaggcctgatggcttcccactggcctccaccacctgaccagagtgttctcttcagaggactggctcctttcccagtgtccttaaaataaagaaatgaaaatgcttgttggcacatt

SEQ ID NO: 13799 - protein, 355 aa, Homo sapiens; identical to SEQ ID NO: 8863
  ref <308>: DATABASE ACCESSION NUMBER: SWISS-Prot / O00182
  ref <309>: DATABASE ENTRY DATE: 2002-06-15

SEQ ID NO: 13800 - DNA, 1428 bp, Rattus norvegicus; identical to SEQ ID NO: 8876
  ref <308>: DATABASE ACCESSION NUMBER: EMBL / U73174
  ref <309>: DATABASE ENTRY DATE: 1996-11-04

SEQ ID NO: 13801 - protein, 420 aa, Rattus norvegicus; identical to SEQ ID NO: 8877
  ref <308>: DATABASE ACCESSION NUMBER: SWISS-Prot / AAB18132
  ref <309>: DATABASE ENTRY DATE: 2003-02-01

SEQ ID NO: 13802 - protein, 522 aa, Homo sapiens; identical to SEQ ID NO: 8878
  ref <308>: DATABASE ACCESSION NUMBER: SWISS-Prot / 1GRT
  ref <309>: DATABASE ENTRY DATE: 2003-02-01

SEQ ID NO: 13803 - DNA, 1428 bp, Rattus norvegicus; identical to SEQ ID NO: 8876
  ref <308>: DATABASE ACCESSION NUMBER: EMBL / U73174
  ref <309>: DATABASE ENTRY DATE: 1996-11-04

SEQ ID NO: 13804 - protein, 420 aa, Rattus norvegicus; identical to SEQ ID NO: 8877
  ref <308>: DATABASE ACCESSION NUMBER: SWISS-Prot / AAB18132
  ref <309>: DATABASE ENTRY DATE: 2003-02-01

SEQ ID NO: 13805 - protein, 522 aa, Homo sapiens; identical to SEQ ID NO: 8878
  ref <308>: DATABASE ACCESSION NUMBER: SWISS-Prot / 1GRT
  ref <309>: DATABASE ENTRY DATE: 2003-02-01

SEQ ID NO: 13806 - DNA, 1428 bp, Rattus norvegicus; identical to SEQ ID NO: 8876
  ref <308>: DATABASE ACCESSION NUMBER: EMBL / U73174
  ref <309>: DATABASE ENTRY DATE: 1996-11-04

SEQ ID NO: 13807 - protein, 420 aa, Rattus norvegicus; identical to SEQ ID NO: 8877
  ref <308>: DATABASE ACCESSION NUMBER: SWISS-Prot / AAB18132
  ref <309>: DATABASE ENTRY DATE: 2003-02-01

SEQ ID NO: 13808 - protein, 522 aa, Homo sapiens; identical to SEQ ID NO: 8878
  ref <308>: DATABASE ACCESSION NUMBER: SWISS-Prot / 1GRT
  ref <309>: DATABASE ENTRY DATE: 2003-02-01

SEQ ID NO: 13809 - DNA, 676 bp, Rattus norvegicus
  misc_feature (1)..(676): n=a, c, g or t
  ref <308>: DATABASE ACCESSION NUMBER: EMBL / U75398
  ref <309>: DATABASE ENTRY DATE: 2000-07-30
gccgcgattcgccgccgccgccagcttccgccgccgcaagatcggcccctgccccagcctccgcggcagccctgcgtccaccacgggccgcggccaccgccagcctgggggcccacctacactccccgcagtgtgcccctgcaccccgcatgtaacccggccaacatccggcgagtgtgccctcagtagcttcggccccgggctgcgcccaccacccaacatcagctctccagctcgcacgtccgggatggcagcggccaaggccganatgcaattgatgtctccgctgcagatctctgacccgttcggctcctttcctcactcacccaccatggacaactaccccaaactggaggagatgatgctgctgagcaacggggctccccagttcctcggtgctgccggaaccccagagggcagcggcggcaataacagcagcagcagcagcancancancancgggggcggtggtgggggcggcancaacagcggcagcagcgctttcaatcctcaaggggagccgagcgaacaaccctacgagcacctgaccacagaatccttttctgacatcgctctgaataacgagaaggcgctggtggagacaagttatcccagccaaactacccggttgcctcccatcacctatactggccgcttctccctggaacctgcacca

SEQ ID NO: 13810 - protein, 115 aa, Rattus norvegicus
  misc_feature (1)..(115): Xaa=Unknown amino acid
  ref <308>: DATABASE ACCESSION NUMBER: SWISS-Prot / AAB38708
  ref <309>: DATABASE ENTRY DATE: 2000-10-01
MDNYPKLEEMMLLSNGAPQFLGAAGTPEGSGGNNSSSSSXXXXGGGGGGGXNSGSSAFNPQGEPSEQPYEHLTTESFSDIALNNEKALVETSYPSQTTRLPPITYTGRFSLEPAP

SEQ ID NO: 13811 - DNA, 3132 bp, Homo sapiens
  ref <308>: DATABASE ACCESSION NUMBER: Refseq / NM_001964
  ref <309>: DATABASE ENTRY DATE: 2002-11-05
ccgcagaacttggggagccgccgccgccatccgccgccgcagccagcttccgccgccgcaggaccggcccctgccccagcctccgcagccgcggcgcgtccacgcccgcccgcgcccagggcgagtcggggtcgccgcctgcacgcttctcagtgttccccgcgccccgcatgtaacccggccaggcccccgcaacggtgtcccctgcagctccagccccgggctgcacccccccgccccgacaccagctctccagcctgctcgtccaggatggccgcggccaaggccgagatgcagctgatgtccccgctgcagatctctgacccgttcggatcctttcctcactcgcccaccatggacaactaccctaagctggaggagatgatgctgctgagcaacggggctccccagttcctcggcgccgccggggccccagagggcagcggcagcaacagcagcagcagcagcagcgggggcggtggaggcggcgggggcggcagcaacagcagcagcagcagcagcaccttcaaccctcaggcggacacgggcgagcagccctacgagcacctgaccgcagagtcttttcctgacatctctctgaacaacgagaaggtgctggtggagaccagttaccccagccaaaccactcgactgccccccatcacctatactggccgcttttccctggagcctgcacccaacagtggcaacaccttgtggcccgagcccctcttcagcttggtcagtggcctagtgagcatgaccaacccaccggcctcctcgtcctcagcaccatctccagcggcctcctccgcctccgcctcccagagcccacccctgagctgcgcagtgccatccaacgacagcagtcccatttactcagcggcacccaccttccccacgccgaacactgacattttccctgagccacaaagccaggccttcccgggctcggcagggacagcgctccagtacccgcctcctgcctaccctgccgccaagggtggcttccaggttcccatgatccccgactacctgtttccacagcagcagggggatctgggcctgggcaccccagaccagaagcccttccagggcctggagagccgcacccagcagccttcgctaacccctctgtctactattaaggcctttgccactcagtcgggctcccaggacctgaaggccctcaataccagctaccagtcccagctcatcaaacccagccgcatgcgcaagtatcccaaccggcccagcaagacgcccccccacgaacgcccttacgcttgcccagtggagtcctgtgatcgccgcttctcccgctccgacgagctcacccgccacatccgcatccacacaggccagaagcccttccagtgccgcatctgcatgcgcaacttcagccgcagcgaccacctcaccacccacatccgcacccacacaggcgaaaagcccttcgcctgcgacatctgtggaagaaagtttgccaggagcgatgaacgcaagaggcataccaagatccacttgcggcagaaggacaagaaagcagacaaaagtgttgtggcctcttcggccacctcctctctctcttcctacccgtccccggttgctacctcttacccgtccccggttactacctcttatccatccccggccaccacctcatacccatcccctgtgcccacctccttctcctctcccggctcctcgacctacccatcccctgtgcacagtggcttcccctccccgtcggtggccaccacgtactcctctgttccccctgctttcccggcccaggtcagcagcttcccttcctcagctgtcaccaactccttcagcgcctccacagggctttcggacatgacagcaaccttttctcccaggacaattgaaatttgctaaagggaaaggggaaagaaagggaaaagggagaaaaagaaacacaagagacttaaaggacaggaggaggagatggccataggagaggagggttcctcttaggtcagatggaggttctcagagccaagtcctccctctctactggagtggaaggtctattggccaacaatcctttctgcccacttccccttccccaattactattccctttgacttcagctgcctgaaacagccatgtccaagttcttcacctctatccaaagaacttgatttgcatggattttggataaatcatttcagtatcatctccatcatatgcctgaccccttgctcccttcaatgctagaaaatcgagttggcaaaatggggtttgggcccctcagagccctgccctgcacccttgtacagtgtctgtgccatggatttcgtttttcttggggtactcttgatgtgaagataatttgcatattctattgtattatttggagttaggtcctcacttgggggaaaaaaaaaaaaaaaagccaagcaaaccaatggtgatcctctattttgtgatgatgctgtgacaataagtttgaacctttttttttgaaacagcagtcccagtattctcagagcatgtgtcagagtgttgttccgttaacctttttgtaaatactgcttgaccgtactctcacatgtggcaaaatatggtttggtttttcttttttttttttgaaagtgttttttcttcgtccttttggtttaaaaagtttcacgtcttggtgccttttgtgtgatgccccttgctgatggcttgacatgtgcaattgtgagggacatgctcacctctagccttaaggggggcagggagtgatgatttgggggaggctttgggagcaaaataaggaagagggctgagctgagcttcggttctccagaatgtaagaaaacaaaatctaaaacaaaatctgaactctcaaaagtctatttttttaactgaaaatgtaaatttataaatatattcaggagttggaatgttgtagttacctactgagtaggcggcgatttttgtatgttatgaacatgcagttcattattttgtggttctattttactttgtacttgtgtttgcttaaacaaagtgactgtttggcttataaacacattgaatgcgctttattgcccatgggatatgtggtgtatatccttccaaaaaattaaaacgaaaataaagtagctgcgattggg

SEQ ID NO: 13812 - protein, 543 aa, Homo sapiens
  ref <308>: DATABASE ACCESSION NUMBER: Refseq / NP_001955
  ref <309>: DATABASE ENTRY DATE: 2002-11-05
MAAAKAEMQLMSPLQISDPFGSFPHSPTMDNYPKLEEMMLLSNGAPQFLGAAGAPEGSGSNSSSSSSGGGGGGGGGSNSSSSSSTFNPQADTGEQPYEHLTAESFPDISLNNEKVLVETSYPSQTTRLPPITYTGRFSLEPAPNSGNTLWPEPLFSLVSGLVSMTNPPASSSSAPSPAASSASASQSPPLSCAVPSNDSSPIYSAAPTFPTPNTDIFPEPQSQAFPGSAGTALQYPPPAYPAAKGGFQVPMIPDYLFPQQQGDLGLGTPDQKPFQGLESRTQQPSLTPLSTIKAFATQSGSQDLKALNTSYQSQLIKPSRMRKYPNRPSKTPPHERPYACPVESCDRRFSRSDELTRHIRIHTGQKPFQCRICMRNFSRSDHLTTHIRTHTGEKPFACDICGRKFARSDERKRHTKIHLRQKDKKADKSVVASSATSSLSSYPSPVATSYPSPVTTSYPSPATTSYPSPVPTSFSSPGSSTYPSPVHSGFPSPSVATTYSSVPPAFPAQVSSFPSSAVTNSFSASTGLSDMTATFSPRTIEIC

SEQ ID NO: 13813 - DNA, 376 bp, Rattus norvegicus
  misc_feature (1)..(376): n=a, c, g or t
  ref <308>: DATABASE ACCESSION NUMBER: EMBL / U75400
  ref <309>: DATABASE ENTRY DATE: 2000-07-30
gaggagaatgttatggaggaggcaaaaggttttcagccttcaagacnaccagttcagcaggacctgatggggaaaccagtttttagcccagttatcatggcttcccaaaccantcacaaagaagaaaagagtttccaggaattagaagatgatttagataccatggaattagaggatattgatacaacagacatcaatctggatgaagatattctggatgactaaagtttgccatttactccagtaagagattatgatggcacatacaaatcagtcaccaccctgaccagaactgtggcaatccttgctntgcacacgtaaacaaggaggaacatagccccttcatnttcagggcagagttttaactgaaacagac

SEQ ID NO: 13814 - protein, 74 aa, Rattus norvegicus
  misc_feature (1)..(74): Xaa=Unknown amino acid
  ref <308>: DATABASE ACCESSION NUMBER: SWISS-Prot / AAB38315
  ref <309>: DATABASE ENTRY DATE: 2001-12-01
EENVMEEAKGFQPSRXPVQQDLMGKPVFSPVIMASQTXHKEEKSFQELEDDLDTMELEDIDTTDINLDEDILDD

SEQ ID NO: 13815 - DNA, 3067 bp, Homo sapiens; identical to SEQ ID NO: 13290
  ref <308>: DATABASE ACCESSION NUMBER: Refseq / NM_004766
  ref <309>: DATABASE ENTRY DATE: 2002-05-29

SEQ ID NO: 13816 - protein, 906 aa, Homo sapiens
  ref <308>: DATABASE ACCESSION NUMBER: Refseq / NP_004757
  ref <309>: DATABASE ENTRY DATE: 2002-05-29
MPLRLDIKRKLTARSDRVKSVDLHPTEPWMLASLYNGSVCVWNHETQTLVKTFEVCDLPVRAAKFVARKNWVVTGADDMQIRVFNYNTLERVHMFEAHSDYIRCIAVHPTQPFILTSSDDMLIKLWDWDKKWSCSQVFEGHTHYVMQIVINPKDNNQFASASLDRTIKVWQLGSSSPNFTLEGHEKGVNCIDYYSGGDKPYLISGADDRLVKIWDYQNKTCVQTLEGHAQNVSCASFHPELPIIITGSEDGTVRIWHSSTYRLESTLNYGMERVWCVASLRGSNNVALGYDEGSIIVKLGREEPAMSMDANGKIIWAKHSEVQQANLKAMGDAEIKDGERLPLAVKDMGSCEIYPQTIQHNPNGRFVVVCGDGEYIIYTAMALRNKSFGSAQEFAWAHDSSEYAIRESNSIVKIFKNFKEKKSFKPDFGAESIYGGFLLGVRSVNGLAFYDWDNTELIRRIEIQPKHIFWSDSGELVCIATEESFFILKYLSEKVLAAQETHEGVTEDGIEDAFEVLGEIQEIVKTGLWVGDCFIYTSSVNRLNYYVGGEIVTIAHLDRTMYLLGYIPKDNRLYLGDKELNIISYSLLVSVLEYQTAVMRRDFSMADKVLPTIPKEQRTRVAHFLEKQGFKQQALTVSTDPEHRFELALQLGELKIAYQLAVEAESEQKWKQLAELAISKCQFGLAQECLHHAQDYGGLLLLATASGNANMVNKLAEGAERDGKNNVAFMSYFLQGKVDACLELLIRTGRLPEAAFLARTYLPSQVSRVVKLWRENLSKVNQKAAESLADPTEYENLFPGLKEAFVVEEWVKETHADLWPAKQYPLVTPNEERNVMEEGKDFQPSRSTAQQELDGKPASPTPVIVASHTANKEEKSLLELEVDLDNLELEDIDTTDINLDEDILDD

SEQ ID NO: 13817 - DNA, 219 bp, Rattus norvegicus; identical to SEQ ID NO: 8897
  misc_feature (1)..(219): n=a, c, g or t
  ref <308>: DATABASE ACCESSION NUMBER: EMBL / U75923
  ref <309>: DATABASE ENTRY DATE: 2000-07-30

SEQ ID NO: 13818 - protein, 50 aa, Rattus norvegicus; identical to SEQ ID NO: 8898
  ref <308>: DATABASE ACCESSION NUMBER: SWISS-Prot / AAB81886
  ref <309>: DATABASE ENTRY DATE: 2001-12-01

SEQ ID NO: 13819 - DNA, 248 bp, Rattus norvegicus
  misc_feature (1)..(248): n=a, c, g or t
  ref <308>: DATABASE ACCESSION NUMBER: EMBL / U75928
  ref <309>: DATABASE ENTRY DATE: 2000-07-30
gtgagactcaagaggaagacagagaaggttgtaacgtagagagagtgagtcataaagtttcaagcatgccccccccacctctccccaccctttgccacttgaaacttactaatcaagagaaacttccaagccaacggaagnaatggtcggatctcacaggctgagaatttgttcccctccaagcatttcatgaaaaagctgcttctcattaaccatgcgaactctcacagtgatgtgaagagcttgac

SEQ ID NO: 13820 - protein, 301 aa, Rattus norvegicus
  ref <308>: DATABASE ACCESSION NUMBER: Refseq / NP_036788
  ref <309>: DATABASE ENTRY DATE: 2000-11-01
MRAWIFFLLCLAGRALAAPQTEAAEEMVAEETVVEETGLPVGANPVQVEMGEFEEGAEETVEEVVAENPCQNHHCKHGKVCELDESNTPMCVCQDPTSCPAPIGEFEKVCSNDNKTFDSSCHFFATKCTLEGTKKGHKLHLDYIGPCKYIAPCLDSELTEFPLRMRDWLKNVLVTLYERDEGNNLLTEKQKLRVKKIHENEKRLEAGDHPVELLARDFEKNYNMYIFPVHWQFGQLDQHPIDGYLSHTELAPLRAPLIPMEHCTTRFFETCDLDNDKYIALEEWAGCFGIKEQDINKDLVI

SEQ ID NO: 13821 - DNA, 2133 bp, Homo sapiens
  ref <308>: DATABASE ACCESSION NUMBER: Refseq / NM_003118
  ref <309>: DATABASE ENTRY DATE: 2002-11-05
cgggagagcgcgctctgcctgccgcctgcctgcctgccactgagggttcccagcaccatgagggcctggatcttctttctcctttgcctggccgggagggccttggcagcccctcagcaagaagccctgcctgatgagacagaggtggtggaagaaactgtggcagaggtgactgaggtatctgtgggagctaatcctgtccaggtggaagtaggagaatttgatgatggtgcagaggaaaccgaagaggaggtggtggcggaaaatccctgccagaaccaccactgcaaacacggcaaggtgtgcgagctggatgagaacaacacccccatgtgcgtgtgccaggaccccaccagctgcccagcccccattggcgagtttgagaaggtgtgcagcaatgacaacaagaccttcgactcttcctgccacttctttgccacaaagtgcaccctggagggcaccaagaagggccacaagctccacctggactacatcgggccttgcaaatacatccccccttgcctggactctgagctgaccgaattccccctgcgcatgcgggactggctcaagaacgtcctggtcaccctgtatgagagggatgaggacaacaaccttctgactgagaagcagaagctgcgggtgaagaagatccatgagaatgagaagcgcctggaggcaggagaccaccccgtggagctgctggcccgggacttcgagaagaactataacatgtacatcttccctgtacactggcagttcggccagctggaccagcaccccattgacgggtacctctcccacaccgagctggctccactgcgtgctcccctcatccccatggagcattgcaccacccgctttttcgagacctgtgacctggacaatgacaagtacatcgccctggatgagtgggccggctgcttcggcatcaagcagaaggatatcgacaaggatcttgtgatctaaatccactccttccacagtaccggattctctctttaaccctccccttcgtgtttcccccaatgtttaaaatgtttggatggtttgttgttctgcctggagacaaggtgctaacatagatttaagtgaatacattaacggtgctaaaaatgaaaattctaacccaagacatgacattcttagctgtaacttaactattaaggccttttccacacgcattaatagtcccatttttctcttgccatttgtagctttgcccattgtcttattggcacatgggtggacacggatctgctgggctctgccttaaacacacattgcagcttcaacttttctctttagtgttctgtttgaaactaatacttaccgagtcagactttgtgttcatttcatttcagggtcttggctgcctgtgggcttccccaggtggcctggaggtgggcaaagggaagtaacagacacacgatgttgtcaaggatggttttgggactagaggctcagtggtgggagagatccctgcagaatccaccaaccagaacgtggtttgcctgaggctgtaactgagagaaagattctggggctgtcttatgaaaatatagacattctcacataagcccagttcatcaccatttcctcctttacctttcagtgcagtttcttttcacattaggctgttggttcaaacttttgggagcacggactgtcagttctctgggaagtggtcagcgcatcctgcagggcttctcctcctctgtcttttggagaaccagggctcttctcaggggctctagggactgccaggctgtttcagccaggaaggccaaaatcaagagtgagatgtagaaagttgtaaaatagaaaaagtggagttggtgaatcggttgttctttcctcacatttggatgattgtcataaggtttttagcatgttcctccttttcttcaccctcccctttgttcttctattaatcaagagaaacttcaaagttaatgggatggtcggatctcacaggctgagaactcgttcacctccaagcatttcatgaaaaagctgcttcttattaatcatacaaactctcaccatgatgtgaagagtttcacaaatctttcaaaataaaaagtaatgacttagaaactgaaaaaaaaaaaaaaaaaaaaaaaaaaaaaa

SEQ ID NO: 13822 - protein, 303 aa, Homo sapiens
  ref <308>: DATABASE ACCESSION NUMBER: Refseq / NP_003109
  ref <309>: DATABASE ENTRY DATE: 2002-11-05
MRAWIFFLLCLAGRALAAPQQEALPDETEVVEETVAEVTEVSVGANPVQVEVGEFDDGAEETEEEVVAENPCQNHHCKHGKVCELDENNTPMCVCQDPTSCPAPIGEFEKVCSNDNKTFDSSCHFFATKCTLEGTKKGHKLHLDYIGPCKYIPPCLDSELTEFPLRMRDWLKNVLVTLYERDEDNNLLTEKQKLRVKKIHENEKRLEAGDHPVELLARDFEKNYNMYIFPVHWQFGQLDQHPIDGYLSHTELAPLRAPLIPMEHCTTRFFETCDLDNDKYIALDEWAGCFGIKQKDIDKDLVI

SEQ ID NO: 13823 - DNA, 3518 bp, Rattus norvegicus
  ref <308>: DATABASE ACCESSION NUMBER: EMBL / U76635
  ref <309>: DATABASE ENTRY DATE: 1997-10-02
cggagacatctctgtgtcagcggtgagtgagctccccttgttcatcgacagttccagagcagactcggggctcatcataccaacagagcaggtctgttctggctactgcagccatctgagtggctttcaggtgagtgtaggggaaggactgggggcctccactggttcagcacaagcgaggcttcagtctttgctgaggaaggtaggttcactgcttctttgtcctgaccactcactccatctcacaggatgaggtacacagggctgatgggaatactgctcaccctggtcaacctgctgcagctggctgcgactctgagaattgcagccttcaacatccggacttttggggatactaagatgtctaatgccaccctctctagctacattgtgaaagtaagttcagggtggcccaagtctgagagcagacatgtggtcaggggaggtagtggctgtccttaaaccacagtgaagctgaggccttaccatacctgggtggatgtcagcccagattactgtcaacactgtccacggctggcaggtatctgacaagagtgtaagcttgagagagctgtgccgttaagagtggcagctgcggctcaggctctctgaagttctgaggccctgagctgctggtccagctctgcccgcccagcctgtcttgctcagctgttgtggccctgtcaccagatcctgagtcgctatgacattgctgtggtccaagaggtcagagacactcacctggttgctgttgggaagctactggatgaactcaatcggtgggtgacagtgctggagtcctagaatgtaatgacaaccatttacagtctcactccctctgtgctccattgatggagccttgatatcaggggccaggaggctccctgtctggtgaaaaagtacctttggtttcctttatccagggacatccctgacaactatcgctatataatcagtgagccgctgggccgcaaaagctacaaggaacagtacctttttgtgtacaggtaaacccccacactgtcaaagcccaagaacacagcctggggacatacagaccccagacctgtgccacagaggctgagagaggtttggagagcccaggcgaccctctttcccttgggaggcccttacagagcaggggtagcaatgtgtattaagaactacaggataaggctccggttgggtgaacatctacttaggcacctctcaagccccagtcacttcttgcctggtctttctttaggcccagccaggtgtctgttttggatagctatcattatgacgatggctgtgaaccctgtggaaatgacaccttcagccgagagccagccattgtcaagttcttttccccatacactggtacgtgctgttgtgctccttccagccctgctcaggccaagatggagtcgcagattgcagctcacatctagatctctagaagctggtggcagggctgctgcctacactccctcagggagctccctcgccttcagctcccagtggtctgcattaacattcactgacaaggatagtgtctcctgtgggagactgccccacatcttcatctctgcgccacagttaaagacgcccctgcataaggccccagtgtgtcttcagaccagccccaacctaggctggcctctggacactatgtcgattgcgtgtctgcttctccttagaggtccgagagtttgcgattgtgcccttgcactcagccccaacagaggctgtgagtgagatcgatgccctctacgatgtttatctagatgtccggcaaaagtggggcctggaggtgagactatcctagggacaatgggttctcttggccctgtttgtccctggaccaacaggcatgtctcctggtaggacatcatgttcatgggagatttcaatgctggctgcagctacgtcacttcctcccaatggtcttccattcgccttcggacaagccccatcttccagtggctgatccctgacagtgcggacaccacagccacatccacacactgtgcttatgacaggcaagcagccccaaagcaaaccaagccttcacttgccctttcctgctcaagaggcaggagctctggttcttgaggctcctagttttcttgtcagagtggctaccagtggatggggtcctatctgggcaccctacatgtccctgctactgcagggtccctcttagtggccctgggtggagtacattggaccctgggggcagcagagcttaaccaaggactctacgtgtcctttgctggattcctttgcaggattgtggttgctggagctctgctccaggctgctgttgttcccagctcggctgtcccctttgacttccaagcagaatacagacttaccaaccagatggtatgtgtcctttccttcatgtggtttaggttagtcagaagccagccggaaccgactgacttggcgattccggcatcgctcctgtttcccacactagatgtgggtgggggcagtgcaggccaggagcagtaggctttctacctgctcaccctctgtggtatggagagcctcactctgacgccatgtcctctgcacctccctgcctctgtaggctgaagccatcagtgaccattacccagtggaggtgacactcagaaagacctgatgtcattgagttcagccacactgcttccggtgaggaagagtccacctcacctatgtgtggtactgcggcattccaacacctcggcacagggaatgtctaccacgcggacttagaaatactgtttaattggagtaaataaagctgagcctgagcaggtagtggtactgactgtgtattaagtccttcctccccaggcaggtccatctgtcacctgagaagatgtgggctgacactagatccagtttcttggctgtcagtgtctctccagggccttgaccagaaggtcattcaggcggcctaccatggcccggggatcatcaacgagtcctgctgctatcatggcgttctcatagatctgaaacacagggatggcatagtacaatcacgatcgggggctcagggacagcctgacctacatctgaccctcagcaagagagcagcttcttacccccaaggcagagaaggatggacccagtcagactttacctgatccactagcagctgggctagctccggctcacgctccctcagctggttgagtttctttattagtgtgtgcctgcatgagcgaaccaacagcaaagtcagctgaggctaagcgtttccaacccggggcatctgctgctacacgaggattactagaacactcaaaggactgcagtgcatctgcctagcatgaaaaaatacactgattctagaagtaatctagaaagagcaacaatcactgttgagagtgtcaacatcaaaaaatgcagatggcgctgagtggcaagctcgatccacactagtaaagggaagtgtctgtaaacgaactctatgcttttaggaacgctacatggatagggaaatagcacgaaagaccactgagaaggcactgagggga

SEQ ID NO: 13824 - protein, 284 aa, Rattus norvegicus
  ref <308>: DATABASE ACCESSION NUMBER: SWISS-Prot / AAB71495
  ref <309>: DATABASE ENTRY DATE: 2001-10-16
MRYTGLMGILLTLVNLLQLAATLRIAAFNIRTFGDTKMSNATLSSYIVKILSRYDIAVVQEVRDTHLVAVGKLLDELNRDIPDNYRYIISEPLGRKSYKEQYLFVYRPSQVSVLDSYHYDDGCEPCGNDTFSREPAIVKFFSPYTEVREFAIVPLHSAPTEAVSEIDALYDVYLDVRQKWGLEDIMFMGDFNAGCSYVTSSQWSSIRLRTSPIFQWLIPDSADTTATSTHCAYDRIVVAGALLQAAVVPSSAVPFDFQAEYRLTNQMAEAISDHYPVEVTLRKT

SEQ ID NO: 13825 - DNA, 2054 bp, Homo sapiens
  ref <308>: DATABASE ACCESSION NUMBER: Refseq / NM_005223
  ref <309>: DATABASE ENTRY DATE: 2002-11-05
ccatagtcttagctactcaggaggctgaggagggaggattatctgagccctggcggttgaggctataatgagccatgattgtgccactgcactccagccttggcaacacagtgtgagaccctgtctcaaaaacaataaaaacccaaaacaaaagaaccaagaaattactggacctgaggcctggcctttagctgctgccctgcccttgtgacctggtcactcgggatcccctgggcctaaacacacagcctattgtctacctcaagaaggctccccactgcttggctggcaattggggtgggctttgcaggccccacctgtcctgtccccacggcgctggtgctgcaggcccccaccactgcttgttccgagctcccccagcctcctgcagagttgcctgcacctgatggcgatgaatcaggaaggcaggcgtgtcctgggccacagagcagtcatggctgtcagccaccagggggctccatttgcacctttggatgtggctttggcctctttgtccaaagtgaccttggggcccccagacaagagacagggagactggagcccagtcccaccctcccgcacatacctggcccatccctgccctatcctggaagatgggggccaccacacgtgcaagggacacgggataggaacctttggccttgttatcagacattttaaaactaagtgcaaacgtgattatcaggtgcagtttttacagcagcaagaaacctgtgcttacagaaagaaacacgtgctagcaacccacctatgcggaaagccacacagagccattgttttctgcactctcaggtgacggctcacatttgccccagggaaggtcacagctgcctgaacttttaaaactcccagacacgcactgcctgtgcaggatccggagcccagcagcactgccaggccttgaagtgcttcttcagagacctttcttcatagactacttttttttctttaagcagcaaaaggagaaaattgtcatcaaaggatattccagattcttgacagcattctcgtcatctctgaggacatcaccatcatctcaggatgaggggcatgaagctgctgggggcgctgctggcactggcggccctactgcagggggccgtgtccctgaagatcgcagccttcaacatccagacatttggggagaccaagatgtccaatgccaccctcgtcagctacattgtgcagatcctgagccgctatgacatcgccctggtccaggaggtcagagacagccacctgactgccgtggggaagctgctggacaacctcaatcaggatgcaccagacacctatcactacgtggtcagtgagccactgggacggaacagctataaggagcgctacctgttcgtgtacaggcctgaccaggtgtctgcggtggacagctactactacgatgatggctgcgagccctgcgggaacgacaccttcaaccgagagccagccattgtcaggttcttctcccggttcacagaggtcagggagtttgccattgttcccctgcatgcggccccgggggacgcagtagccgagatcgacgctctctatgacgtctacctggatgtccaagagaaatggggcttggaggacgtcatgttgatgggcgacttcaatgcgggctgcagctatgtgagaccctcccagtggtcatccatccgcctgtggacaagccccaccttccagtggctgatccccgacagcgctgacaccacagctacacccacgcactgtgcctatgacaggatcgtggttgcagggatgctgctccgaggcgccgttgttcccgactcggctcttccctttaacttccaggctgcctatggcctgagtgaccaactggcccaagccatcagtgaccactatccagtggaggtgatgctgaagtgagcagccccctccccacaccagttgaactgcaggaagagaggacccatcctgccacaggacccagaaaaaaagcccaacacacactcgggttaagaaatacctttaaatttaggtaaataaagctcaaggaggtggggctgtca

SEQ ID NO: 13826 - protein, 282 aa, Homo sapiens [sequence omitted]

SEQ ID NO: 13827 - DNA, 3518 bp, Rattus norvegicus; identical to SEQ ID NO: 13823
  ref <308>: DATABASE ACCESSION NUMBER: EMBL / U76635
  ref <309>: DATABASE ENTRY DATE: 1997-10-02

SEQ ID NO: 13828 - protein, 284 aa, Rattus norvegicus; identical to SEQ ID NO: 13824
  ref <308>: DATABASE ACCESSION NUMBER: SWISS-Prot / AAB71495
  ref <309>: DATABASE ENTRY DATE: 2001-10-16

SEQ ID NO: 13829 - DNA, 2054 bp, Homo sapiens; identical to SEQ ID NO: 13825
  ref <308>: DATABASE ACCESSION NUMBER: Refseq / NM_005223
  ref <309>: DATABASE ENTRY DATE: 2002-11-05

SEQ ID NO: 13830 - protein, 282 aa, Homo sapiens [sequence omitted]

SEQ ID NO: 13831 - DNA, 3197 bp, Rattus norvegicus
  ref <308>: DATABASE ACCESSION NUMBER: EMBL / U76997
  ref <309>: DATABASE ENTRY DATE: 2000-03-04
tcggggccgcttcagctctcggagtagaaagcttggggcgctgggctggtgaggacccgcagcgggcgaagatggagacctttaccaatgatcgacttcagcttccaaggaatatgattgaaaacagcatgtttgaagaagaaccagatgtggtagatttagccaaagaaccttgtttacatcctctggaacctgatgaagttgaatatgagccccgaggttcgaggcttctggtgagaggtcttggtgagcatgagatggatgaggatgaagaggattatgagtcatctgccaagctgctgggcatgtccttcatgaacagaagctcaggccttcggaacagtgcaacaggctacaggcagagtccagatgggacttgttcagtaccctctgccaggaccttagtaatctgtgtttttgtcattgtggttgctgtctctgtaatcatggtgatttatctactgcctagatgtacctttaccaaagaaggctgccacaaaacaaaccagtcagcagaactcattcagccgattgctacaaacgggaaagtgtttccatgggcacaaattaggcttcccactgccattattcctcaacgctatgaacttagcctacatccaaacctaacctcaatgacattcaggggttctgtgacaatttcacttcaggctcttcaagatacacgggacatcattctccatagcacaggacataatatttcaagtgtgacatttatgtcggcggtttccagtcaagaaaaacaagttgaaattctggaatatccatatcatgaacaaatcgccgttgttgcccctgaaagccttctaacaggacacaattataccttgaagatagaatattcagcaaatatatctaactcttactatgggttttatggcatcacctacacagataaaagtaatgagaaaaagaactttgcagcaactcagtttgaacctttggcagcaagatctgcttttccttgttttgatgaaccagcatttaaggccacatttatcatcaagatcacaagggatgagcaccatactgcattatcaaatatgcctaagaagtcatcagtccctacagaagaaggacttattcaagatgagttttctgaaagtgtgaaaatgagcacatacctggttgctttcattgtaggggagatgaggaacctgagtcaggatgtaaacgggactctggtttctgtatatgctgtaccagaaaaaattgatcaagtttaccatgccttggacacaactgtaaagctccttgagttttatcaaaattactttgaaattcaatacccactaaagaaattggatctggtggccattcctgactttgaagcaggagcaatggaaaattggggcctgcttacgttccgagaagagactcttctgtatgacaatgccacttcttcagtagcagatagaaaactggtcactaaaatcatcgctcacgagctggcacatcagtggtttggtaatctggttacaatgcagtggtggaatgacctgtggctaaacgaaggctttgccactttcatggagtatttctctgtggaaaaaatattcaaagagctcaacagttatgaagacttcttagatgctcgatttaaaaccatgaggaaagattccttgaattcgtctcatccaatatcatcatctgttcagtcatcagaacaaatagaagaaatgtttgattctctttcgtattttaagggagcgtctctcttgttgatgttgaaaagttaccttagtgaagacgtgtttcagcatgccatcattctttacctgcacaatcacagctatgcagcaattcaaagcgatgacctctgggacagcttcaatgaggtcacaggcaaaactctagatgtaaagaaaatgatgaaaacctggaccctacagaaaggattcccattagtgaccgtccagagaaaggggactgagcttcttctacaacaagaaagattttttccaagcatgcaaccagaaattcaggattcagatacaagccacctttggcatattccaatatcctatgtcactgatggaagaaactattcagaatatcgatcagtttcactactggacaagaaatcagatgtcatcaatcttacagaacaagtacaatgggtcaaagtcaatacaaacatgacgggctactacattgttcactatgctcatgatggctgggcagctctaatcaaccagttaaaaagaaatccctatgttctgagtgacaaagaccgagccaacctgatcaataacatctttgaacttgcaggccttggcaaagtgcctcttcagatggcattcgatttgattgactaccttagaaatgagacccacactgcacctatcactgaagccctgttccagactgacctcatctataatctcctggaaaaactgggacacatggacctgtcctcaagattagtgaccagagtacataaattgctccagaaccaaatccagcagcagacatggacagatgaaggcacaccatccatgcgagagcttcggtcagccttgctggaatttgcctgcgcccacagcctagagaactgtaccactatggccacaaagctgtttgatggttggatggcatcaaatggaactcagagcctgccgactgacgtcatgaccactgtgttcaaagttggagcaagaaccgagaaaggctggttgttcctctttagcatgtactcctccatgggctctgaagcagagaaggataaaatacttgaagccctggccagctcagcggatgcacataaactttactggttaatgaaaagtagccttgatggtgatatcattcggacacagaagttgtcacttatcattagaacagtgggcagacagtttcctggacatttgctggcatgggattttgttaaggaaaactggaataagcttgtacataagttccatctgggctcctataccattcaaagcattgttgctggatctactcacttattttcaacgaagacacatttatctgaggtccaggaattcttcgaaaatcagtcagaggcaaccttgcagcttcggtgtgttcaggaggccttcgaagtgattgagctgaatatccagtggatggccaggaatctgaaaactctgacactgtggctgtagccctcacagctgatcttccggtgcccatggctctgctgctttcgcaaa

SEQ ID NO: 13832 - protein, 1025 aa, Rattus norvegicus
  ref <308>: DATABASE ACCESSION NUMBER: SWISS-Prot / AAB19066
  ref <309>: DATABASE ENTRY DATE: 2002-06-15
METFTNDRLQLPRNMIENSMFEEEPDVVDLAKEPCLHPLEPDEVEYEPRGSRLLVRGLGEHEMDEDEEDYESSAKLLGMSFMNRSSGLRNSATGYRQSPDGTCSVPSARTLVICVFVIVVAVSVIMVIYLLPRCTFTKEGCHKTNQSAELIQPIATNGKVFPWAQIRLPTAIIPQRYELSLHPNLTSMTFRGSVTISLQALQDTRDIILHSTGHNISSVTFMSAVSSQEKQVEILEYPYHEQIAVVAPESLLTGHNYTLKIEYSANISNSYYGFYGITYTDKSNEKKNFAATQFEPLAARSAFPCFDEPAFKATFIIKITRDEHHTALSNMPKKSSVPTEEGLIQDEFSESVKMSTYLVAFIVGEMRNLSQDVNGTLVSVYAVPEKIDQVYHALDTTVKLLEFYQNYFEIQYPLKKLDLVAIPDFEAGAMENWGLLTFREETLLYDNATSSVADRKLVTKIIAHELAHQWFGNLVTMQWWNDLWLNEGFATFMEYFSVEKIFKELNSYEDFLDARFKTMRKDSLNSSHPISSSVQSSEQIEEMFDSLSYFKGASLLLMLKSYLSEDVFQHAIILYLHNHSYAAIQSDDLWDSFNEVTGKTLDVKKMMKTWTLQKGFPLVTVQRKGTELLLQQERFFPSMQPEIQDSDTSHLWHIPISYVTDGRNYSEYRSVSLLDKKSDVINLTEQVQWVKVNTNMTGYYIVHYAHDGWAALINQLKRNPYVLSDKDRANLINNIFELAGLGKVPLQMAFDLIDYLRNETHTAPITEALFQTDLIYNLLEKLGHMDLSSRLVTRVHKLLQNQIQQQTWTDEGTPSMRELRSALLEFACAHSLENCTTMATKLFDGWMASNGTQSLPTDVMTTVFKVGARTEKGWLFLFSMYSSMGSEAEKDKILEALASSADAHKLYWLMKSSLDGDIIRTQKLSLIIRTVGRQFPGHLLAWDFVKENWNKLVHKFHLGSYTIQSIVAGSTHLFSTKTHLSEVQEFFENQSEATLQLRCVQEAFEVIELNIQWMARNLKTLTLWL

SEQ ID NO: 13833 - DNA, 3642 bp, Homo sapiens
  ref <308>: DATABASE ACCESSION NUMBER: Refseq / NM_005575
  ref <309>: DATABASE ENTRY DATE: 2002-11-05
ctcagctctcggagtaggaagctcgggcgctccggctgtaaggagccgcggcagggggaaaatggagcccttcaccaatgatcggcttcagctccccaggaatatgattgaaaacagcatgtttgaggaagaaccagatgtggtggatttagccaaagagccttgtttacatcctctagagcctgatgaggtggaatatgagccccggggttcccgactgctggtgcggggtcttggtgagcatgagatggaggaggatgaagaggattatgagtcatcagcaaagctgctgggcatgtccttcatgaatagaagctcaggccttcggaacagtgcaactggttacaggcagagcccagatggggcttgttcagtaccctctgcaaggaccatggtggtctgtgcttttgtcatcgtggttgctgtttctgtaatcatggtgatttacttactgcccagatgtacctttaccaaagaaggctgccataaaaaaaaccagtcaattggactaattcagccatttgcaacaaatgggaaattgtttccatgggcacagatcaggcttcccactgccgttgtgccactacgctatgaactcagcctacacccgaacctaacctcgatgacattcaggggttctgtgacaatttcagttcaggctcttcaggtcacatggaatatcattcttcatagcacaggtcataatatttcaagagtgacctttatgtcagcagtttcaagccaagaaaaacaagctgagatcctggaatatgcatatcatggacagatcgccattgttgcccccgaagcccttctagcagggcacaattatacgttgaagatagagtactcggcaaatatatctagttcttattatgggttttatggcttctcctacacagatgaaagtaatgagaaaaagtactttgcagcaactcagtttgaacccctggcagcaagatctgcttttccttgttttgatgaaccagcatttaaagccacttttatcatcaagatcataagggatgagcaatacaccgctttatcaaatatgcctaagaagtcatcagtcgttctagatgatggacttgttcaggatgagttttctgagagtgtgaagatgagcacttacttggttgctttcattgtgggagagatgaagaacctgagtcaggacgtaaatggaaccctggtttctatatatgctgtaccagaaaatattggtcaagttcattatgccttggaaacaactgtgaagcttcttgagttttttcaaaactactttgaaattcagtacccacttaagaaattggatttggtggctattcctgactttgaagcaggagcaatggaaaattggggtttgctcaccttccgagaggagacacttctgtatgacagtaacacttcttcaatggcggatagaaagctggtgactaaaatcattgctcatgagctggcccaccagtggtttggcaatctggtaacaatgaagtggtggaatgacctatggctaaatgaaggttttgccactttcatggagtatttctctttggaaaaaatattcaaagagctttctagttatgaagatttcttagatgctcgatttaaaaccatgaagaaagattccttaaattcatctcatccaatatcatcatctgttcagtcttcagaacaaattgaagaaatgtttgattctctttcctattttaagggatcttctctcttgttgatgttgaaaacttaccttagtgaagatgtgtttcaacatgctgttgtcctttacctgcataatcacagctatgcatctattcaaagtgatgatctgtgggatagttttaatgaggtcacaaaccaaacactagatgtaaagagaatgatgaaaacctggaccctgcagaaaggatttcctttagtgactgttcaaaagaaaggaaaggaactttttatacaacaagagagattctttttaaatatgaagcctgaaattcagccttcagatacaagctacctgtggcatattccactatcctatgtcactgaaggaagaaattattcaaaatatcaatcggtatcattactggataagaaatcaggtgtcatcaatcttacagaagaagtgctgtgggtcaaagtgaatataaacatgaatggttattatattgtacactatgcagatgatgattgggaagcactaatccatcagttgaaaataaatccttatgttctgagtgacaaagaccgagccaaccttatcaacaacatctttgaacttgcaggcctaggcaaggtacctctcaagagggcctttgatttgattaattatcttggaaatgagaaccatactgcacccatcaccgaagccctgtttcagacagacctcatctataacctccttgaaaaactgggatacatggatctggcctcaagactggtgactagggtatttaaattacttcaaaaccaaattcaacaacaaacttggactgatgagggcactccatctatgcgagagcttcggtcagccctgctagagtttgcttgcacccacaacctggggaactgctctactactgccatgaaactgtttgatgactggatggcatccaatggaactcaaagcctacctactgatgtcatgacaactgtgttcaaagttggagcaaaaactgacaaaggctggtcattccttttgggcaaatacatttctataggctctgaagcagagaagaacaaaatactagaagcacttgccagctcagaggatgtgcggaagctttactggttaatgaaaagtagcctgaatggagataacttccgaacacagaagctgtcttttatcattagaacagtgggtcgacattttcctggacacttactggcatgggattttgtcaaagagaactggaataagcttgtacagaagttccctctggggtcctataccatacaaaatattgttgctggatcaacttacctgttttcaacaaagacacatttatctgaggttcaggcattctttgaaaatcagtcagaggcaaccttccggcttcgttgtgtccaggaggctttggaagtcattcagttgaatatccagtggatggagaagaacctcaaaagtctcacatggtggctgtagcatgcacaaccgcacctcattttgttgcccattcagagagcttgtaagcttgggctctgccgcttttgcaaaagccaaggtaaagccaggatcgctgccaagttgtttgcactctttggagttctagttagctcagggcctgactgtatttttcatccatcttttctgaagtgtctttgggcagtatgtagttatttattacaaaattatattcacgtaaatgccaaccatctacaaaaacaatgagtaatttttctactttgaagatacacagatggggacaaaaaccctgttttggaattctgttctattcctcagtatccagaaagttactgacacagtaaaacaaggaaagttctaccctaagagccgccatcacttcaggccgctggtttgtcagccatctgctgcttcttattgatagatggcattggaatgtggtacaaagttagctctgaagaatatggtaacgaagacaataaagcatgcactgtaagaactga

SEQ ID NO: 13834 - protein, 1025 aa, Homo sapiens
  ref <308>: DATABASE ACCESSION NUMBER: Refseq / NP_005566
  ref <309>: DATABASE ENTRY DATE: 2002-11-05
MEPFTNDRLQLPRNMIENSMFEEEPDVVDLAKEPCLHPLEPDEVEYEPRGSRLLVRGLGEHEMEEDEEDYESSAKLLGMSFMNRSSGLRNSATGYRQSPDGACSVPSARTMVVCAFVIVVAVSVIMVIYLLPRCTFTKEGCHKKNQSIGLIQPFATNGKLFPWAQIRLPTAVVPLRYELSLHPNLTSMTFRGSVTISVQALQVTWNIILHSTGHNISRVTFMSAVSSQEKQAEILEYAYHGQIAIVAPEALLAGHNYTLKIEYSANISSSYYGFYGFSYTDESNEKKYFAATQFEPLAARSAFPCFDEPAFKATFIIKIIRDEQYTALSNMPKKSSVVLDDGLVQDEFSESVKMSTYLVAFIVGEMKNLSQDVNGTLVSIYAVPENIGQVHYALETTVKLLEFFQNYFEIQYPLKKLDLVAIPDFEAGAMENWGLLTFREETLLYDSNTSSMADRKLVTKIIAHELAHQWFGNLVTMKWWNDLWLNEGFATFMEYFSLEKIFKELSSYEDFLDARFKTMKKDSLNSSHPISSSVQSSEQIEEMFDSLSYFKGSSLLLMLKTYLSEDVFQHAVVLYLHNHSYASIQSDDLWDSFNEVTNQTLDVKRMMKTWTLQKGFPLVTVQKKGKELFIQQERFFLNMKPEIQPSDTSYLWHIPLSYVTEGRNYSKYQSVSLLDKKSGVINLTEEVLWVKVNINMNGYYIVHYADDDWEALIHQLKINPYVLSDKDRANLINNIFELAGLGKVPLKRAFDLINYLGNENHTAPITEALFQTDLIYNLLEKLGYMDLASRLVTRVFKLLQNQIQQQTWTDEGTPSMRELRSALLEFACTHNLGNCSTTAMKLFDDWMASNGTQSLPTDVMTTVFKVGAKTDKGWSFLLGKYISIGSEAEKNKILEALASSEDVRKLYWLMKSSLNGDNFRTQKLSFIIRTVGRHFPGHLLAWDFVKENWNKLVQKFPLGSYTIQNIVAGSTYLFSTKTHLSEVQAFFENQSEATFRLRCVQEALEVIQLNIQWMEKNLKSLTWWL

SEQ ID NO: 13835 - DNA, 562 bp, Rattus norvegicus
  ref <308>: DATABASE ACCESSION NUMBER: EMBL / U81492
  ref <309>: DATABASE ENTRY DATE: 1998-06-01
ctttggaggaccagaacgagacaatggttcttgccagctctaccaccagcatcctctgtatgctgctcccgctcctgatgctcttccaccagggactccagatttcagacaggggctcagatgcccaccatttactcaggacgttggattgcaggactattgccttggagattttggtgaagctcccatatcctcaggtatctggactcaataatagtgacgacaaagccaatctgaggaatagtaccttgcggagagtaaacctggacgaattcctaaaaagccaagaggagtttgattctcaggacacaacggacatcaagtccaaacttcagaaacttaagtgttgtattcctgcagctgcgagcgactctgtgttgccaggtgtctacaataaagatctggatgactttaagaagaaactgagattctacgtgatccatcttaaggacctgcagccagtgtcagtctctagaccacctcagcccacatctagctctgacaactttcgccctatgaccgtggaatgttaaaacagcaggcagagcaactggagcctgaa

SEQ ID NO: 13836 - protein, 169 aa, Rattus norvegicus
  ref <308>: DATABASE ACCESSION NUMBER: SWISS-Prot / AAC17704
  ref <309>: DATABASE ENTRY DATE: 2001-06-01
MVLASSTTSILCMLLPLLMLFHQGLQISDRGSDAHHLLRTLDCRTIALEILVKLPYPQVSGLNNSDDKANLRNSTLRRVNLDEFLKSQEEFDSQDTTDIKSKLQKLKCCIPAAASDSVLPGVYNKDLDDFKKKLRFYVIHLKDLQPVSVSRPPQPTSSSDNFRPMTVEC

SEQ ID NO: 13837 - DNA, 673 bp, Homo sapiens
  ref <308>: DATABASE ACCESSION NUMBER: Refseq / NM_000588
  ref <309>: DATABASE ENTRY DATE: 2002-11-05
gatccaaacatgagccgcctgcccgtcctgctcctgctccaactcctggtccgccccggactccaagctcccatgacccagacaacgtccttgaagacaagctgggttaactgctctaacatgatcgatgaaattataacacacttaaagcagccacctttgcctttgctggacttcaacaacctcaatggggaagaccaagacattctgatggaaaataaccttcgaaggccaaacctggaggcattcaacagggctgtcaagagtttacagaacgcatcagcaattgagagcattcttaaaaatctcctgccatgtctgcccctggccacggccgcacccacgcgacatccaatccatatcaaggacggtgactggaatgaattccggaggaaactgacgttctatctgaaaacccttgagaatgcgcaggctcaacagacgactttgagcctcgcgatcttttagtccaacgtccagctcgttctctgggccttctcaccacagcgcctcgggacatcaaaaacagcagaacttctgaaacctctgggtcatctctcacacattccaggaccagaagcatttcaccttttcctgcggcatcagatgaattgttaattatctaatttctgaaatgtgcagctcccatttggccttgtgcggttgtgttctc

SEQ ID NO: 13838 - protein, 152 aa, Homo sapiens
  ref <308>: DATABASE ACCESSION NUMBER: Refseq / NP_000579
  ref <309>: DATABASE ENTRY DATE: 2002-11-05
MSRLPVLLLLQLLVRPGLQAPMTQTTSLKTSWVNCSNMIDEIITHLKQPPLPLLDFNNLNGEDQDILMENNLRRPNLEAFNRAVKSLQNASAIESILKNLLPCLPLATAAPTRHPIHIKDGDWNEFRRKLTFYLKTLENAQAQQTTLSLAIF

SEQ ID NO: 13839 - DNA, 3622 bp, Rattus norvegicus; identical to SEQ ID NO: 8988
  ref <308>: DATABASE ACCESSION NUMBER: EMBL / U82623
  ref <309>: DATABASE ENTRY DATE: 1997-12-20

SEQ ID NO: 13840 - protein, 693 aa, Rattus norvegicus; identical to SEQ ID NO: 8989
  ref <308>: DATABASE ACCESSION NUMBER: SWISS-Prot / AAB91537
  ref <309>: DATABASE ENTRY DATE: 2002-10-01

SEQ ID NO: 13841 - DNA, 4230 bp, Homo sapiens; identical to SEQ ID NO: 13500
  ref <308>: DATABASE ACCESSION NUMBER: Refseq / NM_006788
  ref <309>: DATABASE ENTRY DATE: 2002-11-05

SEQ ID NO: 13842 - protein, 655 aa, Homo sapiens; identical to SEQ ID NO: 8991
  ref <308>: DATABASE ACCESSION NUMBER: Refseq / NP_006779
  ref <309>: DATABASE ENTRY DATE: 2002-11-05

SEQ ID NO: 13843 - DNA, 1572 bp, Rattus norvegicus
  ref <308>: DATABASE ACCESSION NUMBER: EMBL / AF375463
  ref <309>: DATABASE ENTRY DATE: 2001-05-31
atgagtttccgcaaggaggacggggtgagcagcctgtgccagaaggcgctgcacatcatcaccgagctgtgcttcgcgggccaggtggagtgggacaagtgttcgggcatctttccagccgataggagcggccagggcggaggtggcacagacatttcagtcagcctgttagcagttgttgtaagcttctgtggcctggccctgctggttgtctcccttttcgtcttctggaagttgtgctggccctgctggaagagcaagctcgtggcccccaatgtcagtacccttccgcagagcatctcaagtgctccaactgaggtttttgagaccgaagagaaaaaagaagtcgaagaaaatgaaaagccagcaccaaaagctattgagcctgcaataaaaatcagccacacatcccccgacatcccagcagaagtgcaaactgctttaaaggagcatttaattaaacatgcccgtgtgcagaggcaaacgaccgatcctacatcttcatcccgccacaattccttcaggaggcacctaccaaggcaaatgaacgtctccagtgttgactttagcatgggcacggaacctgtcttacaaagaggagaaaccagaaccagcatcgggaggataaaaccggaactctataagcagaaatcagttgactccgagggcaacagaaaagacgacgtcaaaacctgtgggaaacttaactttgcgctccagtacgattatgaaaatgaactcctagttgttaaaattatcaaagctctagatctcccagctaaagatttcacaggaacttctgatccttatgtgaagatctatcttcttccggacaggaagaagaaatttcagacccgtgtgcaccggaagactttaaaccctctgttcgatgagctatttcagttcccggtggtttacgatcagctaagcaaccgcaaattacactttagtatatatgattttgacagattttccagacacgacatgattggggaagtgattcttgataatttatttgaagtctctgatctctccagggaagccacagtatggaaagatatccactgtgcaaccacagaaagcatagacctgggcgaaatcatgttttccctttgctatttgccaactgctggtcgcatgaccttgactgtgatcaagtgcagaaatctgaaggcaatggacattaccggatcatcagatccttatgtcaaagtgtctctgatgtgtgagggccgaagacttaaaaaaagaaaaacaactacaaagaaaaatactctcaatcccgtgtacaatgaagccattattttcgatatccctccagaaaatgtggaccaggtcagcctgtgcattgcggtcatggattatgacagggtgggacacaatgaggtcataggtgtgtgtcgaactggacttgacgctgagggtcttggaagagaccattggaatgaaatgctggcctatcaccgaaagccaatcacacactggcaccccttgctggagttacctggccgagcaaccagttttgacagtcaaggatcctgttcttctcccaggccaccgtccacaccataa

SEQ ID NO: 13844 - protein, 523 aa, Rattus norvegicus
  ref <308>: DATABASE ACCESSION NUMBER: SWISS-Prot / AAK56958
  ref <309>: DATABASE ENTRY DATE: 2003-02-01
MSFRKEDGVSSLCQKALHIITELCFAGQVEWDKCSGIFPADRSGQGGGGTDISVSLLAVVVSFCGLALLVVSLFVFWKLCWPCWKSKLVAPNVSTLPQSISSAPTEVFETEEKKEVEENEKPAPKAIEPAIKISHTSPDIPAEVQTALKEHLIKHARVQRQTTDPTSSSRHNSFRRHLPRQMNVSSVDFSMGTEPVLQRGETRTSIGRIKPELYKQKSVDSEGNRKDDVKTCGKLNFALQYDYENELLVVKIIKALDLPAKDFTGTSDPYVKIYLLPDRKKKFQTRVHRKTLNPLFDELFQFPVVYDQLSNRKLHFSIYDFDRFSRHDMIGEVILDNLFEVSDLSREATVWKDIHCATTESIDLGEIMFSLCYLPTAGRMTLTVIKCRNLKAMDITGSSDPYVKVSLMCEGRRLKKRKTTTKKNTLNPVYNEAIIFDIPPENVDQVSLCIAVMDYDRVGHNEVIGVCRTGLDAEGLGRDHWNEMLAYHRKPITHWHPLLELPGRATSFDSQGSCSSPRPPSTP

SEQ ID NO: 13845 - DNA, 2931 bp, Homo sapiens; identical to SEQ ID NO: 1907
  ref <308>: DATABASE ACCESSION NUMBER: Refseq / NM_032298
  ref <309>: DATABASE ENTRY DATE: 2002-05-14

SEQ ID NO: 13846 - protein, 590 aa, Homo sapiens; identical to SEQ ID NO: 1908
  ref <308>: DATABASE ACCESSION NUMBER: Refseq / NP_115674
  ref <309>: DATABASE ENTRY DATE: 2002-05-14

SEQ ID NO: 13847 - DNA, 678 bp, Rattus norvegicus; identical to SEQ ID NO: 9018
  ref <308>: DATABASE ACCESSION NUMBER: EMBL / U86635
  ref <309>: DATABASE ENTRY DATE: 2000-10-27

SEQ ID NO: 13848 - protein, 217 aa, Rattus norvegicus; identical to SEQ ID NO: 9019
  ref <308>: DATABASE ACCESSION NUMBER: PIR / A29036
  ref <309>: DATABASE ENTRY DATE: 1999-06-18

SEQ ID NO: 13849 - DNA, 1266 bp, Homo sapiens
  ref <308>: DATABASE ACCESSION NUMBER: EMBL / J05459
  ref <309>: DATABASE ENTRY DATE: 2000-03-04
ctcggaagcccgtcaccatgtcgtgcgagtcgtctatggttctcgggtactgggatattcgtgggctggcgcacgccatccgcctgctcctggagttcacggatacctcttatgaggagaaacggtacacgtgcggggaagctcctgactatgatcgaagccaatggctggatgtgaaattcaagctagacctggactttcctaatctgccctacctcctggatgggaagaacaagatcacccagagcaatgccatcttgcgctacatcgctcgcaagcacaacatgtgtggtgagactgaagaagaaaagattcgagtggacatcatagagaaccaagtaatggatttccgcacacaactgataaggctctgttacagctctgaccacgaaaaactgaagcctcagtacttggaagagctacctggacaactgaaacaattctccatgtttctgtggaaattctcatggtttgccggggaaaagctcacctttgtggattttctcacctatgatatcttggatcagaaccgtatatttgaccccaagtgcctggatgagttcccaaacctgaaggctttcatgtgccgttttgaggctttggagaaaatcgctgcctacttacagtctgatcagttctgcaagatgcccatcaacaacaagatggcccagtggggcaacaagcctgtatgctgagcaggaggcagacttgcagagcttgttttgtttcatcctgtccgtaaggggtcagcgctcttgctttgctcttttcaatgaatagcacttatgttactggtgtccagctgagtttctcttgggtataaaggctaaaagggaaaaaggatatgtggagaatcatcaagatatgaattgaatcgctgcgatactgtggcatttccctactccccaactgagttcaagggctgtaggttcatgcccaagccctgagagtgggtactagaaaaaacgagattgcacagttggagagagcaggtgtgttaaatggactggagtccctgtgaagactgggtgaggataacacaagtaaaactgtggtactgatggacttaaccggagttcggaaaccgtcctgtgtacacatgggagtttagtgtgataaaggcagtatttcagactggtgggctagccaatagagttggcaattgcttattgaaactcattaaaaataatagagccccacttgacactattcactaaaattaatctggaatttaaggcccaacattaaacacaaagctgtattgat

SEQ ID NO: 13850 - protein, 226 aa, Homo sapiens
  misc_feature (1)..(226): Xaa=Unknown amino acid
MSCESSMVLGYWDIRGLAHAIRLLLEFTDTSYEEKRYTCGEAPDYDRSQWLDVKFKLDLDFPNLPYLLDGKNKITQSNAILRYIARKHNMCGETEEEKIRVDIIENQVMDFRTQLIRLCYSSDHEKLKPQYLEELPGQLKQFSMFLWKFSWFAGEKLTFVDFLTYDILDQNRIFDPKCLDEFPNLKAFMCRFEALEKIAAYLQSDQFCKMPINNKMAQWGNKPVCX

SEQ ID NO: 13851 - DNA, 678 bp, Rattus norvegicus; identical to SEQ ID NO: 9018
  ref <308>: DATABASE ACCESSION NUMBER: EMBL / U86635
  ref <309>: DATABASE ENTRY DATE: 2000-10-27

SEQ ID NO: 13852 - protein, 217 aa, Rattus norvegicus; identical to SEQ ID NO: 9019
  ref <308>: DATABASE ACCESSION NUMBER: PIR / A29036
  ref <309>: DATABASE ENTRY DATE: 1999-06-18

SEQ ID NO: 13853 - DNA, 1266 bp, Homo sapiens; identical to SEQ ID NO: 13849
  ref <308>: DATABASE ACCESSION NUMBER: EMBL / J05459
  ref <309>: DATABASE ENTRY DATE: 2000-03-04

SEQ ID NO: 13854 - protein, 226 aa, Homo sapiens; identical to SEQ ID NO: 13850
  misc_feature (1)..(226): Xaa=Unknown amino acid

SEQ ID NO: 13855 - DNA, 678 bp, Rattus norvegicus; identical to SEQ ID NO: 9018
  ref <308>: DATABASE ACCESSION NUMBER: EMBL / U86635
  ref <309>: DATABASE ENTRY DATE: 2000-10-27

SEQ ID NO: 13856 - protein, 217 aa, Rattus norvegicus; identical to SEQ ID NO: 9019
  ref <308>: DATABASE ACCESSION NUMBER: PIR / A29036
  ref <309>: DATABASE ENTRY DATE: 1999-06-18

SEQ ID NO: 13857 - DNA, 1266 bp, Homo sapiens; identical to SEQ ID NO: 13849
  ref <308>: DATABASE ACCESSION NUMBER: EMBL / J05459
  ref <309>: DATABASE ENTRY DATE: 2000-03-04

SEQ ID NO: 13858 - protein, 226 aa, Homo sapiens; identical to SEQ ID NO: 13850
  misc_feature (1)..(226): Xaa=Unknown amino acid

SEQ ID NO: 13859 - DNA, 2118 bp, Rattus norvegicus
  ref <308>: DATABASE ACCESSION NUMBER: EMBL / U87627
  ref <309>: DATABASE ENTRY DATE: 2000-03-04
aggatgagcagtgactactcgtacaccgctaggatgttgggcaaaggggcactgatgacactaccaaggtgaaaccagccctcctggccatgggaggagctgtggtggacgagggtcccaccggcatcaaggcccccgatgggggctggggctgggccgtcctctttggctgtttcatcatcacgggcttctcctatgccttccccaaagcggtcagtgtttttttcaaggagctcatgcatgagtttgggattggctacagcgacacagcttggatctcctccatcctgctggctatgctgtatggcacaggcccactctgcagtatgtgtgtgaaccgctttggctgccggcccgtcatgcttgtgggtggcctctttgcgtccctggggatggtggctgcatccttctgcagaagcattatccagatctacctcaccacaggggtcatcactggcttgggtctggctctcaacttccagccctccctcatcatgctcaatcgatacttcaacaagcgccgccctatggccaatgggctggcagcagcaggcagtcccgtgttcctttgtgcactgtctccactggggcagctgctgcaggaccactatggctggcggggtggcttcctcatcctgggaggcctgctgctcaactgctgcgtgtgtgctgcactcatgagaccactggtagcaccccaggcgagtggaggggctgagccccatggaccccagcggccgtctccgcgcctgctagacctgagtgtcttccgagaccgtggcttcctcatctatgctgtggctgcctcaatcatggtgctggggctctttgtgcctccggtctttgtggtgagctatgctaaggatatgggtgtgcctgacacaaaggctgccttccttctcaccatcctgggcttcatcgacatctttgccaggcccacggcaggtttcataacagggctcaagaaggtgcggccctactctgtctacctcttcagctttgccatgttcttcaatggcttcactgacctgacaggctccacggccagtgactacggtggcctggtggtcttttgcatcttctttgggatctcgtatggcatggtgggagcgctacagtttgaggtgctcatggctatcgtgggcactcaaaagttctccagtgccattggtctcgtgctgctgttagaggctgtggctgtgctcatcggacccccatcaggaggcaagctgctggacgcaacgaaagtttacaagtatgtgttcatcctggcgggggctgaggtgctcacctcctcccttgtgctgctgctgggcaacttcttctgcatcgggaagaggaagaggcccgaggtgacaaagcctgaggaggtggcctcagaggaggagaagctccacaagccccctgtggacgtgagggtggactcgagggaggtggagcacttcctgaaggcagagcctgagaaaaacggggaggtggttcataccccggaaaccagcgtgtgagcggcctggccgggcgggcagggagcagggaagaggtccagagactggcaacgctcatatttatttcacaaacaggaccagctgaggcggggccatcggctcagctcttggctgcctggtcagcgggtcagtgttttgcggggagaggtggcggggtgggaaccgcgtcattccaaagtggatctgcggtgaagccaaggaagccccacagttaccagccgcctataaccagggacccagcctgctgagcccaagcagcctgtggctcccccgcccccaccactgtggccaaggacctagaaacccacacttaggagacaacacgactttaatcagagggcagggctgggacaggctggcaggtgggcactgcctgcagggtcctccctgatccccaccatcctacccccaacttcagccccagtctcctatattgccaatcctccatatctctgtctaggggacaaagaactccttctacctgagaaggcagagatagacatctctgtgggaggatcaccaaagggcctgtctctaggagctgtgtggtttctgggcagtggtctgttcaccctgagtcccacctttgttaaataacaaactcctgattctt

SEQ ID NO: 13860 - protein, 489 aa, Rattus norvegicus; identical to SEQ ID NO: 8751
  ref <308>: DATABASE ACCESSION NUMBER: SWISS-Prot / Q63344
  ref <309>: DATABASE ENTRY DATE: 2002-06-15

SEQ ID NO: 13861 - DNA, 1982 bp, Homo sapiens
  ref <308>: DATABASE ACCESSION NUMBER: EMBL / U81800
  ref <309>: DATABASE ENTRY DATE: 2000-03-04
ggcgagaggcgggctgaggcggcccagcggcggcaggtgaggcggaaccaaccctcctggccatgggaggggccgtggtggacgagggccccacaggcgtcaaggcccctgacggcggctggggctgggccgtgctcttcggctgtttcgtcatcactggcttctcctacgccttccccaaggccgtcagtgtcttcttcaaggagctcatacaggagtttgggatcggctacagcgacacagcctggatctcctccatcctgctggccatgctctacgggacaggtccgctctgcagtgtgtgcgtgaaccgctttggctgccggcccgtcatgcttgtggggggtctctttgcgtcgctgggcatggtggctgcgtccttttgccggagcatcatccaggtctacctcaccactggggtcatcacggggttgggtttggcactcaacttccagccctcgctcatcatgctgaaccgctacttcagcaagcggcgccccatggccaacgggctggcggcagcaggtagccctgtcttcctgtgtgccctgagcccgctggggcagctgctgcaggaccgctacggctggcggggcggcttcctcatcctgggcggcctgctgctcaactgctgcgtgtgtgccgcactcatgaggcccctggtggtcacggcccagccgggctcggggccgccgcgaccctcccggcgcctgctagacctgagcgtcttccgggaccgcggctttgtgctttacgccgtggccgcctcggtcatggtgctggggctcttcgtcccgcccgtgttcgtggtgagctacgccaaggacctgggcgtgcccgacaccaaggccgccttcctgctcaccatcctgggcttcattgacatcttcgcgcggccggccgcgggcttcgtggcggggcttgggaaggtgcggccctactccgtctacctcttcagcttctccatgttcttcaacggcctcgcggacctggcgggctctacggcgggcgactacggcggcctcgtggtcttctgcatcttctttggcatctcctacggcatggtgggggccctgcagttcgaggtgctcatggccatcgtgggcacccacaagttctccagtgccattggcctggtgctgctgatggaggcggtggccgtgctcgtcgggcccccttcgggaggcaaactcctggatgcgacccacgtctacatgtacgtgttcatcctggcgggggccgaggtgctcacctcctccctgattttgctgctgggcaacttcttctgcattaggaagaagcccaaagagccacagcctgaggtggcggccgcggaggaggagaagctccacaagcctcctgcagactcgggggtggacttgcgggaggtggagcatttcctgaaggctgagcctgagaaaaacggggaggtggttcacaccccggaaacaagtgtctgagtggctgggcggggccggcaggcacagggaggaggtacagaagccggcaacgcttgctatttattttacaaactggactggctcaggcagggccacggctgggctccagctgccggcccagcggatcgtcgcccgatcagtgttttgagggggaaggtggcggggtgggaaccgtgtcattccagagtggatctgcggtgaagccaagccgcaaggttacaaggcatcctcaccaggggccccgcctgctgctcccaggtggcctgcggccactgctatgctcaaggacctggaaacccatgcttcgagacaacgtgactttaatgggagggtgggtgggccgcagacaggctggcagggcaggtgctgcgtggggccctctccagcccgtcctaccctgggctcacatggggcctgtgcccacccctcttgagtgtcttggggacagctctttccacccctggaagatggaaataaacctgcgtgtgggtggagtgttctcgtgccgaattcaaaaagctt

SEQ ID NO: 13862 - protein, 465 aa, Homo sapiens
  ref <308>: DATABASE ACCESSION NUMBER: SWISS-Prot / O15427
  ref <309>: DATABASE ENTRY DATE: 2001-10-16
MGGAVVDEGPTGVKAPDGGWGWAVLFGCFVITGFSYAFPKAVSVFFKELIQEFGIGYSDTAWISSILLAMLYGTGPLCSVCVNRFGCRPVMLVGGLFASLGMVAASFCRSIIQVYLTTGVITGLGLALNFQPSLIMLNRYFSKRRPMANGLAAAGSPVFLCALSPLGQLLQDRYGWRGGFLILGGLLLNCCVCAALMRPLVVTAQPGSGPPRPSRRLLDLSVFRDRGFVLYAVAASVMVLGLFVPPVFVVSYAKDLGVPDTKAAFLLTILGFIDIFARPAAGFVAGLGKVRPYSVYLFSFSMFFNGLADLAGSTAGDYGGLVVFCIFFGISYGMVGALQFEVLMAIVGTHKFSSAIGLVLLMEAVAVLVGPPSGGKLLDATHVYMYVFILAGAEVLTSSLILLLGNFFCIRKKPKEPQPEVAAAEEEKLHKPPADSGVDLREVEHFLKAEPEKNGEVVHTPETSV

SEQ ID NO: 13863 - DNA, 1665 bp, Rattus norvegicus
  ref <308>: DATABASE ACCESSION NUMBER: EMBL / U90121
  ref <309>: DATABASE ENTRY DATE: 1997-03-18
ctcgccttcaagcggcccaccgaccagtcgcctccactttgcggtccgctgtgcgtcacggtctcaacagcaacagaagctgcaccaggcgagccggcctgggaagagaagccgtgcgagaacgagaccaagggttttctctgcgagttttacttcgcagctttctgcagcaggcctttacgggtgaatacccgagatcctgagggtgcccacatctctagcacctacaataccccattgggggtcagcggcgcggattttcagacgctgccgataggcagttctgctaccgtggcgccctttggcttggagctggtgtgcagggccctgcccggaacttcagagggacactggactcgggaagtgacaggagcttggaactgcagcgtggagaatggtggctgcgagtacatgtgcaacaggagcgctaacggacccagatgcgtttgccccagcggcggggacctgcaggctgatggccgttcgtgcgcaaaacctgtgggtcaattgtgcaacgaactctgccagcatttttgcgtcaacaactctgatgtgccaggctcttattcctgtatgtgcgaaacaggctaccagttggcggcagacggacatcggtgtgaggacgtggatgactgtaagcaggggcccaatccatgccctcagctctgttctaacaccgagggcggcttcgaatgccgctgctatgatggctatgagttggtggacggagagtgcgtggagcaactggatccgtgcttcagatctaaatgcgagtatcagtgccagccagtaaactccacgcactacaattgcatctgtgctgagggcttcgcacctaagctggatgatcccgacaggtgcgaaatgttctgcaatgaaacttcgtgcccagcagactgtgaccccaactccccaagcttttgtcaatgccctgagggcttcatcctggacgagggttccatatgcacagacattgatgagtgcagtcaaggcgaatgcctaaccaatgaatgtcgaaaccttcctggctcctatgagtgcatctgcggacctgacacagcccttgctggtcagattagcaaggactgtgaccccatccctgttctggaggactcagaggatggtggctctggggagcacccatcaagcaatccgacggtagtctcttcgacagttcccccttctgcaagaccaatgcactctggtgtgctcattgggatctccattgccagcctgtccctggtggtggcgcttttggcgcttctttgtcacctgcgcaagaagcagggcactgctcgcgcagagctggagtacaagtgtacctcttcagccaaggaggtattactgcagcacgtgaggactgatcggacgctgcaaaacttctgagggatttactccagagaccaaggtggcctttgtctttccgggctctgtacctctcctttctctctcttcagcctcccaactgtgctctctggcaatgtaaaagcattgtggctggtataataaccagagaagagctcatcctcttatgacaagcgagggtagggaggacttgaagccggagagcccagttttttccaagtagagaatggacaactgggcggaggtgacaaatacagtgaagatcccagagtgtcccagtccctcacctcggggtgcagg

SEQ ID NO: 13864 - protein, 461 aa, Rattus norvegicus
  ref <308>: DATABASE ACCESSION NUMBER: SWISS-Prot / AAB49723
  ref <309>: DATABASE ENTRY DATE: 2003-02-01
LAFKRPTDQSPPLCGPLCVTVSTATEAAPGEPAWEEKPCENETKGFLCEFYFAAFCSRPLRVNTRDPEGAHISSTYNTPLGVSGADFQTLPIGSSATVAPFGLELVCRALPGTSEGHWTREVTGAWNCSVENGGCEYMCNRSANGPRCVCPSGGDLQADGRSCAKPVGQLCNELCQHFCVNNSDVPGSYSCMCETGYQLAADGHRCEDVDDCKQGPNPCPQLCSNTEGGFECRCYDGYELVDGECVEQLDPCFRSKCEYQCQPVNSTHYNCICAEGFAPKLDDPDRCEMFCNETSCPADCDPNSPSFCQCPEGFILDEGSICTDIDECSQGECLTNECRNLPGSYECICGPDTALAGQISKDCDPIPVLEDSEDGGSGEHPSSNPTVVSSTVPPSARPMHSGVLIGISIASLSLVVALLALLCHLRKKQGTARAELEYKCTSSAKEVLLQHVRTDRTLQNF

SEQ ID NO: 13865 - DNA, 4050 bp, Homo sapiens
  ref <308>: DATABASE ACCESSION NUMBER: Refseq / NM_000361
  ref <309>: DATABASE ENTRY DATE: 2000-10-31
cttgcaatccaggctttccttggaagtggctgtaacatgtatgaaaagaaagaaaggaggaccaagagatgaaagagggctgcacgcgtgggggcccgagtggtgggcggggacagtcgtcttgttacaggggtgctggccttccctggcgcctgcccctgtcggccccgcccgagaacctccctgcgccagggcagggtttactcatcccggcgaggtgatcccatgcgcgagggcgggcgcaagggcggccagagaacccagcaatccgagtatgcggcatcagcccttcccaccaggcacttccttccttttcccgaacgtccagggagggagggccgggcacttataaactcgagccctggccgatccgcatgtcagaggctgcctcgcaggggctgcgcgcacggcaagaagtgtctgggctgggacggacaggagaggctgtcgccatcggcgtcctgtgcccctctgctccggcacggccctgtcgcagtgcccgcgctttccccggcgcctgcacgcggcgcgcctgggtaacatgcttggggtcctggtccttggcgcgctggccctggccggcctggggttccccgcacccgcagagccgcagccgggtggcagccagtgcgtcgagcacgactgcttcgcgctctacccgggccccgcgaccttcctcaatgccagtcagatctgcgacggactgcggggccacctaatgacagtgcgctcctcggtggctgccgatgtcatttccttgctactgaacggcgacggcggcgttggccgccggcgcctctggatcggcctgcagctgccacccggctgcggcgaccccaagcgcctcgggcccctgcgcggcttccagtgggttacgggagacaacaacaccagctatagcaggtgggcacggctcgacctcaatggggctcccctctgcggcccgttgtgcgtcgctgtctccgctgctgaggccactgtgcccagcgagccgatctgggaggagcagcagtgcgaagtgaaggccgatggcttcctctgcgagttccacttcccagccacctgcaggccactggctgtggagcccggcgccgcggctgccgccgtctcgatcacctacggcaccccgttcgcggcccgcggagcggacttccaggcgctgccggtgggcagctccgccgcggtggctcccctcggcttacagctaatgtgcaccgcgccgcccggagcggtccaggggcactgggccagggaggcgccgggcgcttgggactgcagcgtggagaacggcggctgcgagcacgcgtgcaatgcgatccctggggctccccgctgccagtgcccagccggcgccgccctgcaggcagacgggcgctcctgcaccgcatccgcgacgcagtcctgcaacgacctctgcgagcacttctgcgttcccaaccccgaccagccgggctcctactcgtgcatgtgcgagaccggctaccggctggcggccgaccaacaccggtgcgaggacgtggatgactgcatactggagcccagtccgtgtccgcagcgctgtgtcaacacacagggtggcttcgagtgccactgctaccctaactacgacctggtggacggcgagtgtgtggagcccgtggacccgtgcttcagagccaactgcgagtaccagtgccagcccctgaaccaaactagctacctctgcgtctgcgccgagggcttcgcgcccattccccacgagccgcacaggtgccagatgttttgcaaccagactgcctgtccagccgactgcgaccccaacacccaggctagctgtgagtgccctgaaggctacatcctggacgacggtttcatctgcacggacatcgacgagtgcgaaaacggcggcttctgctccggggtgtgccacaacctccccggtaccttcgagtgcatctgcgggcccgactcggcccttgcccgccacattggcaccgactgtgactccggcaaggtggacggtggcgacagcggctctggcgagcccccgcccagcccgacgcccggctccaccttgactcctccggccgtggggctcgtgcattcgggcttgctcataggcatctccatcgcgagcctgtgcctggtggtggcgcttttggcgctcctctgccacctgcgcaagaagcagggcgccgccagggccaagatggagtacaagtgcgcggccccttccaaggaggtagtgctgcagcacgtgcggaccgagcggacgccgcagagactctgagcggcctccgtccaggagcctggctccgtccaggagctgtgcctcctcacccccagctttgctaccaaagcaccttagctggcattacagctggagaagaccctccccgcaccccccaagctgttttcttctattccatggctaactggcgagggggtgattagagggaggagaatgagcctcggcctcttccgtgacgtcactggaccactgggcaatgatggcaattttgtaacgaagacacagactgcgatttgtcccaggtcctcactaccgggcgcaggagggtgagcgttattggtcggcagccttctgggcagaccttgacctcgtgggctagggatgactaaaatatttattttttttaagtatttaggtttttgtttgtttcctttgttcttacctgtatgtctccagtatccactttgcacagctctccggtctctctctctctacaaactcccacttgtcatgtgacaggtaaactatcttggtgaatttttttttcctagccctctcacatttatgaagcaagccccacttattccccattcttcctagttttctcctcccaggaactgggccaactcacctgagtcaccctacctgtgcctgaccctacttcttttgctcatctagctgtctgctcagacagaacccctacatgaaacagaaacaaaaacactaaaaataaaaatggccatttgctttttcaccagatttgctaatttatcctgaaatttcagattcccagagcaaaataattttaaacaaagggttgagatgtaaaaggtattaaattgatgttgctggactgtcatagaaattacacccaaagaggtatttatctttacttttaaacagtgagcctgaattttgttgctgttttgatttgtactgaaaaatggtaattgttgctaatcttcttatgcaatttccttttttgttattattacttatttttgacagtgttgaaaatgttcagaaggttgctctagattgagagaagagacaaacacctcccaggagacagttcaagaaagcttcaaactgcatgattcatgccaattagcaattgactgtcactgttccttgtcactggtagaccaaaataaaaccagctctactggtcttgtggaattgggagcttgggaatggatcctggaggatgcccaattagggcctagccttaatcaggtcctcagagaatttctaccatttcagagaggccttttggaatgtggcccctgaacaagaattggaagctgccctgcccatgggagctggttagaaatgcagaatcctaggctccaccccatccagttcatgagaatctatatttaacaagatctgcagggggtgtgtctgctcagtaatttgaggacaaccattccagactgcttccaattttctggaatacatgaaatatagatcagttataagtagcaggccaagtcaggcccttattttcaagaaactgaggaattttctttgtgtagctttgctctttggtagaaaaggctaggtacacagctctagacactgccacacagggtctgcaaggtctttggttcagctaagctaggaatgaaatcctgcttcagtgtatggaaataaatgtatcatagaaatgtaacttttgtaagacaaaggttttcctcttctattttgtaaactcaaaatatttgtacatagttatttatttattggagataatctagaacacaggcaaaatccttgcttatgacatcacttgtacaaaataaacaaataacaatgtg

SEQ ID NO: 13866 - protein, 575 aa, Homo sapiens; identical to SEQ ID NO: 565
  ref <308>: DATABASE ACCESSION NUMBER: Refseq / NP_000352
  ref <309>: DATABASE ENTRY DATE: 2000-10-31

SEQ ID NO: 13867 - DNA, 1070 bp, Rattus norvegicus
  ref <308>: DATABASE ACCESSION NUMBER: EMBL / U90215
  ref <309>: DATABASE ENTRY DATE: 2000-04-07
gggcaccgaagatgcgctccattagaaaacggtggaccatctgcactataagtctactcctgatcttttataagacaaaagaaatagccaggactgaggagcaccaagagacgcaactcatcggagatggtgaattatgcttgagcagatcacttgtcaacaactctgataaaatcactcggaaggctggttccaccatcttccaacattccgtacaaggctggaaaatcaattcttctttagtcctggagataaggaagaatattctccgtttcctagacgcagaacgtgacgtgtcggtggtcaagagcagtttcaagcctggtgatgtcatacactatgtgctggacagacgccggacactaaatatttcccacgatctgcatagcctcctgcctgaagtttcaccaatgaaaaaccgcaggtttaagacctgtgctgttgttggaaattccggcattctactagacagtggatgtggaaaggagatcgacagccacaactttgtcataaggtgtaatctagctcccgtggtggagttcgctgcggatgtggggactaagtcagatttcattaccatgaatccatcagttgtgcaaagagcattcggaggctttcggaatgagagtgacagagaaaaatttgtgcacagactctccatgctgaatgacagtgtcctttggattcctgccttcatggtcaaaggaggagagaagcacgtggaatgggttaatgcattaatccttaagaataaactgaaagtgaggactgcctatccatcactgagactcattcatgcggtcagaggttactggctgaccaacaaagttcctatcaaaagacccatcactggtctcctcatgtacacccttgccaccagattctgtgacgaaattcacctgtatggattctggccatttcctaaggatctgaacgggaaagctgtcaaatatcattactatgatgacttgaaatatagatacttttccaacgcaagtcctcacagaatgccactggaattcaaaacattgaatgtgctgcacaatagaggagctctaaaactgaccaca

SEQ ID NO: 13868 - protein, 353 aa, Rattus norvegicus
  ref <308>: DATABASE ACCESSION NUMBER: SWISS-Prot / AAB49989
  ref <309>: DATABASE ENTRY DATE: 2002-10-01
MRSIRKRWTICTISLLLIFYKTKEIARTEEHQETQLIGDGELCLSRSLVNNSDKITRKAGSTIFQHSVQGWKINSSLVLEIRKNILRFLDAERDVSVVKSSFKPGDVIHYVLDRRRTLNISHDLHSLLPEVSPMKNRRFKTCAVVGNSGILLDSGCGKEIDSHNFVIRCNLAPVVEFAADVGTKSDFITMNPSVVQRAFGGFRNESDREKFVHRLSMLNDSVLWIPAFMVKGGEKHVEWVNALILKNKLKVRTAYPSLRLIHAVRGYWLTNKVPIKRPITGLLMYTLATRFCDEIHLYGFWPFPKDLNGKAVKYHYYDDLKYRYFSNASPHRMPLEFKTLNVLHNRGALKLTT

SEQ ID NO: 13869 - DNA, 1894 bp, Homo sapiens
  ref <308>: DATABASE ACCESSION NUMBER: Refseq / NM_005668
  ref <309>: DATABASE ENTRY DATE: 2002-11-05
cgcaaacagggcgagaggtcgctgggcagcgttcgaggaccagagggagctcggccacagaagaccccagtgatctgatcccgggatcccggctccaagctctcctcgcattttacagatttcacccccgcgactatctccccaaaacggagcctttatatcaagagaaggtgcgggagctggggcaaccaggactttctcgggcacccaagatgcgctccattaggaagaggtggacgatctgcacaataagtctgctcctgatcttttataagacaaaagaaatagcaagaactgaggagcaccaggagacgcaactcatcggagatggtgaattgtctttgagtcggtcacttgtcaatagctctgataaaatcattcgaaaggctggctcttcaatcttccagcacaatgtagaaggttggaaaatcaattcctctttggtcctagagataaggaagaacatacttcgtttcttagatgcagaacgagatgtgtcagtggtcaagagcagttttaagcctggtgatgtcatacactatgtgcttgacaggcgccggacactaaacatttctcatgatctacatagcctcctacctgaagtttcaccaatgaagaatcgcaggtttaagacctgtgcagttgttggaaattctggcattctgttagacagtgaatgtggaaaggagattgacagtcacaattttgtaataaggtgtaatctagctcctgtggtggagtttgctgcagatgtgggaactaaatcagattttattaccatgaatccatcagttgtacaaagagcatttggaggctttcgaaatgagagtgacagagaaaaatttgtgcatagactttccatgctgaatgacagtgtcctttggattcctgctttcatggtcaaaggaggagagaagcacgtggagtgggttaatgcattaatccttaagaataaactgaaagtgcgaactgcctatccgtcattgagacttattcatgctgtcagaggttactggctgaccaacaaagttcctatcaaaagacccagcacaggtcttctcatgtatacacttgccacaagattctgtgatgaaattcacctgtatggattctggcccttccctaaggatttaaatggaaaagcggtcaaatatcattattatgatgacttaaaatataggtacttttccaatgcaagccctcacagaatgccattagaattcaaaacattaaatgtgctacataatagaggagctctaaaactgacaacaggaaagtgtgtaaagcaataaagcacattttgaaacaaacaatatgcacttcttttctgagatgcttccgaagatttgaaaataggatccaaaacacggctgggtttcagcatccaccaatgaactgaaaggtgaataaaggacgttcatgagaaatcgactaccagctgatgaaatacctgcaaagtgctctaaaaattaaatattttgactttaagggtcctagtaagtgccacttccactaagaatacagtttgaatgtataatcagtagtgtttacaagatccaacagtgcactcatcattagttaacaaagcaaatatgttcatcactgtcaggctgcccacagcaacaccaagcatattagaagaggaaccccaggaacgcaactcagaccttgggaaattaaaccatccttgtcagcagaagccaagatggaagcagtttgagcaatgaaatccgtaagattaaacaactcaagtaaatgcttcagtcaggactctgagtctgatcatgaattttatgttttaatttatgtttttttttttgtcttctggaatctcttttggtttggatattgggatgcttagaaatcctttctgagatgcatatgagtgaggaaa

SEQ ID NO: 13870 - protein, 359 aa, Homo sapiens; identical to SEQ ID NO: 6076
  ref <308>: DATABASE ACCESSION NUMBER: Refseq / NP_005659
  ref <309>: DATABASE ENTRY DATE: 2002-11-05

SEQ ID NO: 13871 - DNA, 1752 bp, Rattus norvegicus
  ref <308>: DATABASE ACCESSION NUMBER: EMBL / U91679
  ref <309>: DATABASE ENTRY DATE: 1998-04-08
tttgttttaacaaacatgtttattagaaaagtaaaaatattgcataggtcttagtacttgaacatcaagtgtattcatgaaccgtgagtatcttcatgtaaacagttctagatggaagacccaggtggcgctcctctgggggagagggttccagccccccacccccctcagccccatcccctcacagctcactcctccagtacaccggcaccgggatgggctgggatgcagctccaggaccccctccctcctcaccacaccctggctgcccgctcccgccaggccttgccggacccggcggcgtctactcttccctgtcacccacagtcaccacgggcgggtatcggcaccccaagcgcaaagctgacgtgcccccccgtgcggtcccccccatctcccaccgcccagtccccggcagcgatgagacagagcggcacctcccagcccctgctgatcaacatgtacctaccagatcccgtcggagatggtctttttaaggaagggaagagcccgagctgggggccgctgagccctgcggtacagaaaggcagcgggcagatccagttgtggcagtttctactggagctgctggcagaccgcgcgaacgccggctgcatcgcgtgggagggcggccacggcgagttcaagctcaccgaccccgacgaggtggcgcgacgctggggcgagcgcaagagcaagcccaatatgaactacgacaagctaagtcgagcactgcgctactactacgacaaaaacatcatgagcaaggtgcacggcaagcgctacgcctaccgctttgacttccagggcctggcacaggcttgccagccaccacccgcgcacgcccacgccgccgctgccgccgccgcagcggcagccgccgcccaggatggcgcactttacaagctcccggctggtctggctccactgcccttccccggcctctccaaactcaaccttatggcagcctcggccggcgtggcgcccgctggcttctcttactggcctggtcccaacgccaccgccgctgccgccgccaccgctgcgctctacccaaccccgggcttgcagccccctcccgggccctttggcgcggtggccgccgcttcgcacttggggggtcattatcactagacgggacggccgggtgcagtggggcctctcccacacagccagtgaccaatcccatcctcatcctgggaggagccccgaagatttccccgacgttcctttaccacagatttcgttgcagcagccgctcccagcccagggaagaaaggatgggaagcctctgaggtcttccttgaatacgaggcttccaggctcccattatcatcaccccaggaagggtgcatgtgctcccactttaatttttctcttccaagtctccagattctggaactcccgtcttttttttctcttctcacctggagcccctgccttcctctttatgacccctagttttctgttttgttttttttttttcctctctctctcctcattttttttctctcccacgacctactccaaacggtagtacctcggtagtacctcgaggcttctcacactccccttttcgggatatgagaagcatcaaaaacatctctgctgttgtccatccctatcccaacactctggcttcgctcccttccataccacactctggcccaaggaccctcgtctgtatatattcctttcagccccattaaagatccaagcttcaaaaaaaaaaaaaaaaaaaaaaaaaaaaaa

SEQ ID NO: 13872 - protein, 340 aa, Rattus norvegicus
  ref <308>: DATABASE ACCESSION NUMBER: SWISS-Prot / AAC12859
  ref <309>: DATABASE ENTRY DATE: 2002-10-01
MEDPGGAPLGERVPAPHPPQPHPLTAHSSSTPAPGWAGMQLQDPLPPHHTLAARSRQALPDPAASTLPCHPQSPRAGIGTPSAKLTCPPVRSPPSPTAQSPAAMRQSGTSQPLLINMYLPDPVGDGLFKEGKSPSWGPLSPAVQKGSGQIQLWQFLLELLADRANAGCIAWEGGHGEFKLTDPDEVARRWGERKSKPNMNYDKLSRALRYYYDKNIMSKVHGKRYAYRFDFQGLAQACQPPPAHAHAAAAAAAAAAAAQDGALYKLPAGLAPLPFPGLSKLNLMAASAGVAPAGFSYWPGPNATAAAAATAALYPTPGLQPPPGPFGAVAAASHLGGHYH

SEQ ID NO: 13873 - DNA, 1901 bp, Homo sapiens
  ref <308>: DATABASE ACCESSION NUMBER: Refseq / NM_017521
  ref <309>: DATABASE ENTRY DATE: 2002-11-05
ccgcggcgagtggagcgggagccgactggaagaagggctctagggagggggctgtggctgctggggtccgaggtggggccgggtacaccagccccatcactgtttgcagagagtcagggaggcggaaaagacacgcgctctaggctcccatcagggcacatggcccgggcccatcccccgcgcgtctccccggctgcggggcgcggggggctgccgggtgcgcttggctgtggcgcggcgcgttggagactttattgcgatgggacgataagaggggcgggggcggggtcctgggggccgaggcggcagcgctttaattaaaacggaaattgcggccccgggccgcgcgggggccggagggttccaagcggccccttagctggaagcgtttctccaggacccccccgcaacccccgccacgcccgggctgccccctcccgccaggccctgccggacccggcgccgtcttctcctccttgtcacccgcggtcgcttcgggcggggatcggtgccaccgagcgcaaagcctgcctcgccccccttccccgtcccccccatctcccaccgcccagtccccggcggcgatgagacagagcggcgcctcccagcccctgctgatcaacatgtacctgccagatcccgtcggagacggtctcttcaaggacgggaagaacccgagctgggggccgctgagccccgcggttcagaaaggcagcggacagatccagctgtggcagtttctgctggagctgctggctgaccgcgcgaacgccggctgcatcgcgtgggagggcggtcacggcgagttcaagctcacggacccggacgaggtggcgcggcggtggggcgagcgcaagagcaagcccaacatgaactacgacaagctgagccgcgccctgcgctactactacgacaagaacatcatgagcaaggtgcatggcaagcgctacgcctaccgcttcgacttccagggcctggcgcaggcctgccagccgccgcccgcgcacgctcatgccgccgccgcagctgctgccgccgccgcggccgcccaggacggcgcgctctacaagctgcccgccggcctcgccccgctgcccttccccggcctctccaaactcaacctcatggccgcctcggccggggtcgcgcccgccggcttctcctactggccgggcccgggccccgccgccaccgctgccgccgccaccgccgcgctctaccccagtcccagcttgcagcccccgcccgggcccttcggggccgtggccgcagcctcgcacttggggggccattaccactagacggggcggtcgggtgcctgcggcctcgcccgcacgcctagagtctcgcccgatcccatcggcatcccggggagggcccgggagcctccgtcaaccgtcctctaatccagagtttactccacctgccgcacttagcagggggacgggaccgaagctccctcaatccttgtctggtactagatttgctcctgtcccaccccgcagtcccctgaggagggcgatgtgcgccctctttcaccttttttcttctaggtctccaggtcccggaggggatttgtggacctctcttgtctccccaccactccagtgcatttccgcctggctcctagaagccccattcaatatcactactctttaacgagtgccaaatcttttcccacttttgctcttccccaaggaactgctcccacctcagcacgtggaggcctctcacggtcctccttcctgggacctgagcaggtttggtgaaagccaccgtcctccgtgacacacggcccccttcctcctgtccccacactcccaggagaaactcccggtgtgtttctgaccctttcagccccattaaagctcctgagctctcaaaaaaaaaaaaaaaaaaaa

SEQ ID NO: 13874 - protein, 238 aa, Homo sapiens
  ref <308>: DATABASE ACCESSION NUMBER: Refseq / NP_059991
  ref <309>: DATABASE ENTRY DATE: 2002-11-05
MRQSGASQPLLINMYLPDPVGDGLFKDGKNPSWGPLSPAVQKGSGQIQLWQFLLELLADRANAGCIAWEGGHGEFKLTDPDEVARRWGERKSKPNMNYDKLSRALRYYYDKNIMSKVHGKRYAYRFDFQGLAQACQPPPAHAHAAAAAAAAAAAAQDGALYKLPAGLAPLPFPGLSKLNLMAASAGVAPAGFSYWPGPGPAATAAAATAALYPSPSLQPPPGPFGAVAAASHLGGHYH

SEQ ID NO: 13875 - DNA, 1083 bp, Rattus norvegicus
  ref <308>: DATABASE ACCESSION NUMBER: EMBL / U91847
  ref <309>: DATABASE ENTRY DATE: 2000-03-04
atgtctcaggagaggcccacgttctaccggcaggagctgaacaagaccgtctgggaggtgcccgagcgataccagaacctgtccccggtgggctcgggagcctacggctcggtgtgtgctgcttttgatacaaagacgggacatcgtgtggcagtgaagaagctgtcgagaccggttcagcccatcattcacgccaaaaggtcctacagggagctgcggctgctgaagcacatgaagcacgagaatgtgattggtctgttggatgtgtttacacctgcaaggtccctggaggaattcaacgatgtgtacctggtgacccatctcatgggggcagacctgaacaacatcgtgaagtgtcagaagcttaccgatgaccacgttcagtttcttatctaccagatcctgcgagggctgaagtatatacactcggctgacataatccacagggacctaaagcccagcaacctcgctgtgaatgaagactgtgagctgaagattctggattttgggctggctcggcacactgatgacgaaatgaccggctacgtggctacccggtggtacagagcccccgagattatgctgaattggatgcactacaaccagacagtggatatttggtccgtgggctgcatcatggctgagctgttgaccggaagaacgttgtttcctggtacagaccatattgatcagttgaagctcattttaagactcgttggaaccccaggggctgagcttctgaagaaaatctcctcagagtctgcaagaaactacattcagtctctggcccagatgccgaagatgaacttcgcaaatgtatttattggtgccaatcccctggctgtcgacctgctggaaaagatgctggttttggactcagataagaggatcacagcagcccaagctcttgcgcatgcctactttgctcagtaccacgaccctgatgatgagccagtggctgacccttatgaccagtcctttgaaagcagggacctccttatagacgaatggaagagcctgacctacgatgaagtcattagctttgtgccaccgccccttgaccaagaagaaatggactcctga

SEQ ID NO: 13876 - protein, 360 aa, Rattus norvegicus; identical to SEQ ID NO: 6961
  ref <308>: DATABASE ACCESSION NUMBER: SWISS-Prot / AAB51285
  ref <309>: DATABASE ENTRY DATE: 2000-05-30

SEQ ID NO: 13877 - DNA, 1315 bp, Rattus norvegicus
  ref <308>: DATABASE ACCESSION NUMBER: EMBL / U92289
  ref <309>: DATABASE ENTRY DATE: 1999-03-15
ctccttcacagctgtcctggctgcagccttccctccaggcagacgtggcaagggctagctatgaatgagtcctatcgctgtcaggcagccacctgggtggaacggggctcctcagcgacaatgggtggtgtgctcttcagtgcaggactgctgggcaatctcctggcgctggtgctgctggcgcgatccgggctggggtcctgccggccagggccactgcatccgccgccctcggtcttttatgtgctagtgtgcggcttgacggtcacccacttgctgggcaagtgtctgatcagcccgatggtcctggctgcctacgcgcaaaatcggagcctaaaggaactgctgcctgcctcaggcaatcagttatgtgaagccttcgccttcctgatgtccttctttgggttagcctcgaccttacagctactggctatggcactggagtgctggctgtctctgggacaccctttcttctaccaaaggcacatcaccgcccgccggggagtgctggtggcgccagtcgcaggcgccttctctttggctttctgtgcgctcccctttgctggctttgggaagttcgtgcagtactgtccaggtacctggtgcttcatccagatgatccacaagaagcgctcattctcggtaataggcttctctgtgctctactccagcctcatggcgctgctggtcctcgcaactgtggtgtgcaacctgggtgccatgtccaacctctatgccatgcacaggcgccagaggcaccatccccgccgctgctccagggaccgcgcccagtcaggctcagactacaggcatgggtccccgaatcctttggaggagctggaccactttgttctgctggctctcacgacagtgctcttcaccatgtgttccctgcctttaatttatcgtgcttactatggagcctttaaacttgtggacagagctgacggagactcggaagacctccaagccttgcgttttctgtctgtgatttccatcgtggacccctggatcttcatcattttcaggacttcagtattccggatgttatttcacaaggctttcacaagacctctgatctacagaaactggtgcagccattcctggcagactaacatggaatccactttgtgagggctttgcatgttctggcaagctgaaaatacagcacacattcggacaaagaactgtggttggaaaagccttacaattgaaatccttaaaaaatacctcccacggggagctaaagagatgcatcggccctgaaagagcatttacttttcttccagaagaccggagttcatttcccagcacc

SEQ ID NO: 13878 - protein, 357 aa, Rattus norvegicus
  ref <308>: DATABASE ACCESSION NUMBER: SWISS-Prot / AAB71762
  ref <309>: DATABASE ENTRY DATE: 2001-12-01
MNESYRCQAATWVERGSSATMGGVLFSAGLLGNLLALVLLARSGLGSCRPGPLHPPPSVFYVLVCGLTVTHLLGKCLISPMVLAAYAQNRSLKELLPASGNQLCEAFAFLMSFFGLASTLQLLAMALECWLSLGHPFFYQRHITARRGVLVAPVAGAFSLAFCALPFAGFGKFVQYCPGTWCFIQMIHKKRSFSVIGFSVLYSSLMALLVLATVVCNLGAMSNLYAMHRRQRHHPRRCSRDRAQSGSDYRHGSPNPLEELDHFVLLALTTVLFTMCSLPLIYRAYYGAFKLVDRADGDSEDLQALRFLSVISIVDPWIFIIFRTSVFRMLFHKAFTRPLIYRNWCSHSWQTNMESTL

SEQ ID NO: 13879 - DNA, 495 bp, Homo sapiens
  ref <308>: DATABASE ACCESSION NUMBER: EMBL / U31099
  ref <309>: DATABASE ENTRY DATE: 1999-06-30
gctgtgcaacctcggcgccatgcgcaacctctatgcgatgcaccggcggctgcagcggcacccgcgctcctgcaccagggactgtgccgagccgcgcgcggacgggagggaagcgtcccctcagcccctggaggagctggatcacctcctgctgctggcgctgatgaccgtgctcttcactatgtgttctctgcccgtaatttatcgcgcttactatggagcatttaaggatgtcaaggagaaaaacaggacctctgaagaagcagaagacctccgagccttgcgatttctatctgtgatttcaattgtggacccttggatttttatcattttcagatctccagtatttcggatattttttcacaagattttcattagacctcttaggtacaggagccggtgcagcaattccactaacatggaatccagtctgtgacagtgtttttcactctgtggtaagctgaggaatatgtcacattttcagtcaaagaacca

SEQ ID NO: 13880 - protein, 359 aa, Homo sapiens
  ref <308>: DATABASE ACCESSION NUMBER: SWISS-Prot / Q13258
  ref <309>: DATABASE ENTRY DATE: 2001-10-16
MKSPFYRCQNTTSVEKGNSAVMGGVLFSTGLLGNLLALGLLARSGLGWCSRRPLRPLPSVFYMLVCGLTVTDLLGKCLLSPVVLAAYAQNRSLRVLAPALDNSLCQAFAFFMSFFGLSSTLQLLAMALECWLSLGHPFFYRRHITLRLGALVAPVVSAFSLAFCALPFMGFGKFVQYCPGTWCFIQMVHEEGSLSVLGYSVLYSSLMALLVLATVLCNLGAMRNLYAMHRRLQRHPRSCTRDCAEPRADGREASPQPLEELDHLLLLALMTVLFTMCSLPVIYRAYYGAFKDVKEKNRTSEEAEDLRALRFLSVISIVDPWIFIIFRSPVFRIFFHKIFIRPLRYRSRCSNSTNMESSL

SEQ ID NO: 13881 - DNA, 1348 bp, Rattus norvegicus
  ref <308>: DATABASE ACCESSION NUMBER: EMBL / U92803
  ref <309>: DATABASE ENTRY DATE: 2000-07-30
ggggcaacaaggagagaggattttgagaagaggggggaaaattagcagagaaaacgacgagacagttcgcagctaaacccaagctctctagccggtgacagagaccggataccgcaagcatcagaactcgagacatgcccaccatcgcttctcccctgcctctcgccaccaccggtcctgagaacggcagctccatctacgactatgactacttggatgacgtgactgtcttggtttgcagcaaagatgaggtcctgtcctttggcagagtctttctgccggtggtctacagcctgatctttgtgctgggcctggccggcaacctccttctcctggtggtattgctccactctgtgcctcaacgacgacggatgattgagctgtacctgctgaacctggctgtctccaacctcttgtttgtagtgacgatgcccttctgggccatctctgtggcctggcattgggttttcggcagtttcctgtgcaaggtggtgagcactctctactctattaacttttactgtggcatcttcttcatcacctgcatgagtctggacaaatacctggagattgtccacgctcagcccctccacagacccaagacccggttcaggaacctgcttctcattgtcatggtgtggatcacagccctggctgtctctgtcccagaaatggtctttgtgaaggtccaccagaccttagatggtgtgtggcactgctatgccgattttggcggacatgcaaccatttggaagctgtacctgcgcttccagatgaacctcctggggtttctcttcccactgttggccatgattttcttttactcccgcatcggttgtgttctggtcaggctgaggccaccgggacagggccgggctctgaggatggctgcggccctggtggtagtcttcttcctgctgtggttcccgtacaacctcaccttgttcctgcactcgctgctggatctgcatgtctttgggaactgtaaaatcagccaccgtctggactatatgttgcaggtgacagagagcctggccttctcccattgttgcttcaccccagtcctctatgccttctccagtcacagtttccgccagtaccttaaagcggttctgtccgtggtgctgagacggcaccaggcacctggcaccgcccacgcccctccatgtagccattcggagagcagcagggttactgcccaggaagatgtggtcagcatgaacgaccttggcgagaggcaggctgacatctcccttaacaagggggagataggaaataattaatccccgggtctgggaacggtggttctctctgagggacagcatggctgtgcttgctgcttgcccca

SEQ ID NO: 13882 - protein, 382 aa, Rattus norvegicus
  ref <308>: DATABASE ACCESSION NUMBER: SWISS-Prot / AAB61572
  ref <309>: DATABASE ENTRY DATE: 2002-06-15
MPTIASPLPLATTGPENGSSIYDYDYLDDVTVLVCSKDEVLSFGRVFLPVVYSLIFVLGLAGNLLLLVVLLHSVPQRRRMIELYLLNLAVSNLLFVVTMPFWAISVAWHWVFGSFLCKVVSTLYSINFYCGIFFITCMSLDKYLEIVHAQPLHRPKTRFRNLLLIVMVWITALAVSVPEMVFVKVHQTLDGVWHCYADFGGHATIWKLYLRFQMNLLGFLFPLLAMIFFYSRIGCVLVRLRPPGQGRALRMAAALVVVFFLLWFPYNLTLFLHSLLDLHVFGNCKISHRLDYMLQVTESLAFSHCCFTPVLYAFSSHSFRQYLKAVLSVVLRRHQAPGTAHAPPCSHSESSRVTAQEDVVSMNDLGERQADISLNKGEIGNN

SEQ ID NO: 13883 - DNA, 1371 bp, Homo sapiens
  ref <308>: DATABASE ACCESSION NUMBER: Refseq / NM_001296
  ref <309>: DATABASE ENTRY DATE: 2001-05-02
ggtcttatgagctgctattgaacacggcagagcctgttggtgacctgcacacaggagccctccagtcagtactgattgaattactcaaggctgcctctctgcaaagttgagcactacaggacgtcgggactgggcatttccttccaacatggccgccactgcctctccgcagccactcgccactgaggatgccgattctgagaatagcagcttctattactatgactacctggatgaagtggccttcatgctctgcaggaaggatgcagtggtgtcctttggcaaagtcttcctcccagtcttctatagcctgatttttgtgttgggcctcagcgggaacctccttcttctcatggtcttgctccgttacgtgcctcgcaggcggatggttgagatctatctgctgaatctggccatctccaaccttctgtttctggtgacactgcccttctggggcatctccgtggcctggcattgggtcttcgggagtttcttgtgcaagatggtgagcactctttatactattaacttttacagtggcatctttttcattagctgcatgagcctggacaagtacctggagatcgttcatgctcagccctaccacaggctgaggacccgggccaagagcctgctccttgctaccatagtatgggctgtgtccctggccgtctccatccctgatatggtctttgtacagacacatgaaaatcccaagggtgtgtggaactgccacgcagatttcggcgggcatgggaccatttggaagctcttcctccgcttccagcagaacctcctagggtttctccttccactccttgccatgatcttcttctactcccgtattggttgtgtcttggtgaggctgaggcccgcaggccagggccgggctttaaaaatagctgcagccttggtggtggccttcttcgtgctatggttcccatacaatctcaccttgtttctgcatacgctgttggacctgcaagtattcgggaactgtgaggtcagccagcatctagactacgcactccaggtaacagagagcatcgccttccttcactgctgcttttcccccatcctgtatgccttctccagtcaccgcttccgccagtacctgaaggctttcctggctgccgtgcttggatggcacctggcacctggcactgcccaggcctcattatccagctgttctgagagcagcatacttactgcccaagaggaaatgactggcatgaatgaccttggagagaggcagtctgagaactaccctaacaaggaggatgtggggaataaatcagcctgagtgaccaaattttggtctggtgggaacagatgggaaccagctcaattgggtgtccactcaaagtgctc

SEQ ID NO: 13884 - protein, 384 aa, Homo sapiens
  ref <308>: DATABASE ACCESSION NUMBER: Refseq / NP_001287
  ref <309>: DATABASE ENTRY DATE: 2001-05-02
MAATASPQPLATEDADSENSSFYYYDYLDEVAFMLCRKDAVVSFGKVFLPVFYSLIFVLGLSGNLLLLMVLLRYVPRRRMVEIYLLNLAISNLLFLVTLPFWGISVAWHWVFGSFLCKMVSTLYTINFYSGIFFISCMSLDKYLEIVHAQPYHRLRTRAKSLLLATIVWAVSLAVSIPDMVFVQTHENPKGVWNCHADFGGHGTIWKLFLRFQQNLLGFLLPLLAMIFFYSRIGCVLVRLRPAGQGRALKIAAALVVAFFVLWFPYNLTLFLHTLLDLQVFGNCEVSQHLDYALQVTESIAFLHCCFSPILYAFSSHRFRQYLKAFLAAVLGWHLAPGTAQASLSSCSESSILTAQEEMTGMNDLGERQSENYPNKEDVGNKSA

SEQ ID NO: 13885 - DNA, 457 bp, Rattus norvegicus
  ref <308>: DATABASE ACCESSION NUMBER: EMBL / U92897
  ref <309>: DATABASE ENTRY DATE: 2001-10-01
gagctgaccggcaccccagaagaggagcacatgggcaagaccacgtcactcatcgagagccagcaccaccacctgctacactgcttagaaaagaccactgggttatcctatcttgtggatgatcccctgttgtctgtacgaacctccaccatcaagaaccacgagtttattgatgagcagatgtttgagcagaactgcatggagagctcaatgcagaactacccatccaccagaagcccttctctgtccagccactcgggcctcaccaccacctgctgctcccgccgtagcaagaagaccacgcacctgcccaactccaacctgccggccacccgcctgcgcagcatgcaagagctcagcaccatccacatccagggcagtgagcagccctccctcaccactagtcgctccagccttaatttgaaagcagacgacggactgagaccaaactgcaaaa

SEQ ID NO: 13886 - protein, 655 aa, Rattus norvegicus
  ref <308>: DATABASE ACCESSION NUMBER: SWISS-Prot / AAB53321
  ref <309>: DATABASE ENTRY DATE: 2003-02-01
MAAGVAAWLPFARAAAIGWMPVANCPMPLAPADKNKRQDELIVLNVSGRRFQTWRTTLERYPDTLLGSTEKEFFFNEDTKEYFFDRDPEVFRCVLNFYRTGKLHYPRYECISAYDDELAFYGILPEIIGDCCYEEYKDRKRENAERLMDDNESENNQESMPSLSFRQTMWRAFENPHTSTLALVFYYVTGFFIAVSVITNVVETVPCGTVPGSKELPCGERYSVAFFCLDTACVMIFTVEYLLRLFAAPSRYRFIRSVMSIIDVVAIMPYYIGLVMTNNEDVSGAFVTLRVFRVFRIFKFSRHSQGLRILGYTLKSCASELGFLLFSLTMAIIIFATVMFYAEKGSSASKFTSIPASFWYTIVTMTTLGYGDMVPKTIAGKIFGSICSLSGVLVIALPVPVIVSNFSRIYHQNQRADKRRAQKKARLARIRVAKTGSSNAYLHSKRNGLLNEALELTGTPEEEHMGKTTSLIESQHHHLLHCLEKTTGLSYLVDDPLLSVRTSTIKNHEFIDEQMFEQNCMESSMQNYPSTRSPSLSSHSGLTTTCCSRRSKKTTHLPNSNLPATRLRSMQELSTIHIQGSEQPSLTTSRSSLNLKADDGLRPNCKTSQITTAIISIPTPPALTPEGESRPPPASPGPNTNIPSITSNVVKVSAL

SEQ ID NO: 13887 - DNA, 405 bp, Rattus norvegicus
  ref <308>: DATABASE ACCESSION NUMBER: EMBL / U95052
  ref <309>: DATABASE ENTRY DATE: 2000-03-04
taatacttgagttgttgcaatatttgattatccatttggttgttacagaaaaattcttaactgtaattgatggttgttgccgtaatagtatattgcctgtatttctacctctagtaatgggctttatgtgctagattttaatatccttgagcctgggcaagtgcacaagtctttttaaaagaaacatggtttacttgcacaaaactgatcagtttgagagatcattaatgcccttgaagtggtttttgtgggtgtgaaacaaatggtgagaatttgaattggtccttcttattatagtattgaaattaagtctacttaatttatcaagtcatgttcatgccctgattttatatacttgtatctatcaataaacattgtgatacttgatgtagttgtaaaaaaaaa

SEQ ID NO: 13888 - protein, 907 aa, Rattus norvegicus
  ref <308>: DATABASE ACCESSION NUMBER: SWISS-Prot / AAC53095
  ref <309>: DATABASE ENTRY DATE: 2002-06-01
MESAIAEGGASRFTASSGGGGSRGAPQHYPKTAGNSEFLGKTPGQNAQKWIPARSTRRDDNSAANNSANEKERHDAIFRKVRGILNKLTPEKFDKLCLELLNVGVESKLILKGVILLIVDKALEEPKYSSLYAQLCLRLAEDAPNFDGPAAEGQPGQKQSTTFRRLLISKLQDEFENRTRNVDVYDKRENPLLPEEEEQRAIAKIKMLGNIKFIGELGKLDLIHESILHKCIKTLGEKKKRVQLKDMGEDLECLCQIMRTVGPRLDHERAKSLMDQYFARMCSLMLSKELPARIRFLLQDTVELREHHWVPRKAFLDNGPKTINQIRQDAVKDLGVFIPAPMAQGMSRDFFLEGPLMPPRMKMDRDPLGGLADMFGQMPGSGIGTGPGVIQDRFPPTMGRHRSNQLFNGHGGHIMPPTQSQFGEMGGKFMKSQGLSQFYHNQSQGLLSQLQGQSKDMPPRFSKKGQLNADEIRLRPDQSFLMNKNQVPMLQPQITMIPPSAQPPRTQTPPLGQTPQLGLKTNPPLIQEKPAKTSKKPPPSKEELLKLTEAGVTDYLNSGNANDAVSGVREMRAPKHFLPEMLSKVIILSLDRSDEDKEKASSLISLLKQEGIATSDNFMQAFLNVLEQCPKLEVDIPLVKSYLAQFAARAIISELVSISELAQPLESGTHFPLFLLCLQQLAKLQDREWLTELFQQSKVNMQKMLPEINQNKDRMLEILEGKGLSFLFPLLKLEKELLKQIKLDPSPQTIYKWSKDNISPTLHVDKGFVNILMTSFLQYISSEVNPPSDETDSSSAPPTEQLEQEKQLLLSFKPVMQKFLHDHVDVQVSALYALQVHCYNSSFPQGMLLRFFVHFYDMEIIEEEAFLAWKEDITQEFPGKGKALFQVNQWLTWLETAEEEESEEEAD

SEQ ID NO: 13889 - DNA, 3786 bp, Homo sapiens
  ref <308>: DATABASE ACCESSION NUMBER: EMBL / U76111
  ref <309>: DATABASE ENTRY DATE: 1999-07-01
gagcagtgagtcggagctctatggaggtggcagcgggtaccgagtggcggctgcagcagcgactcctctgagctgagtttgaggccgtccccgactccttcctcccccttccctcccccttttttttgttttccgttcccctttcccctcccttccctatccccgacgaccggatcctgaggaggcagctgcggtggcagctgctgagtttctcggtgaaggtatttcatttctactgtcccctcccctccccaccccatctattaatattattcttttgaagattcttcgttgtcaagccgccaaagtggagagtgcgattgcagaagggggtgcttctcgtttcagtgcttcttcgggcggaggaggaagtaggggtgcacctcagcactatcccaagactgctggcaacagcgagttcctggggaaaaccccagggcaaaacgctcagaaatggattcctgcgcgaagcactagacgagatgacaactccgcagcaaacaactccgcaaacgaaaaagaacgacatgatgcaatcttcaggaaagtaagaggcatactaaataagcttactcctgaaaagtttgacaagctatgccttgagctcctcaatgtgggtgtagagtctaaactcatccttaaaggggtcatactgctgattgtggacaaagccctagaggagccaaagtatagctcactgtatgctcagctatgtctgcgattggcagaagatgcaccaaactttgatggcccagcagcagagggtcaaccaggacagaagcaaagcaccacattcagacgcctcctaattcccaaattacaagatgaatttgaaaaccgaactagaaatgttgatgtctatgataagcgtgaaaatcccctcctccccgaggaggaggaacagagagccattgctaagatcaagatgttgggaaacatcaaattcattggagagcttggcaagcttgatcttattcacgaatctatccttcataagtgcatccaaacacttttggaaaagaagaagagagtccaactccaagatatgggagaggatttggagtgcctctgtcagataatgaggacagtgggacctagattagaccatgaacgagccaagtccttaatggatcagtactttgcccgaatgtgctccttgatgttaagtaaggaattgccagcaaggattcgtttcctgctgcaggataccgtagagttgcgagaacaccattgggttcctcgcaaggcttttcttgacaatggaccaaagacgatcaatcaaattcgtcaagatgcagtaaaagatctaggggtgtttattcctgctcctatggctcaagggatgagaagtgacttccttctggagggaccgttcatgccacccaggatgaaaatggatagggacccacttggaggacttgctgatatgtttggacaaatgccaggtagcggaattggtactggtccaggagttatccaggatagattttcacccaccatgggacgtcatcgttcaaatcaactcttcaatggccatgggggacacatcatgcctcccacacaatcgcagtttggagagatgggaggcaagtttatgaaaagccaggggctaagccagctctaccataaccagagtcagggactcttatcccagctgcaaggacagtcgaaggatatgccacctcggttttctaagaaaggacagcttaatgcagatgagattagcctgaggcctgctcagtcgttcctaatgaataaaaatcaagtgccaaagcttcagccccagataactatgattcctcctagtgcacaaccaccacgcactcaaacaccacctctgggacagacacctcagcttggtctcaaaactaatccaccacttatccaggaaaagcctggcaagaccagcaaaaagccaccaccgtcaaaggaagaactccttaaactaactgaaactgttgtgactgaatatctaaatagtggaaatgcaaatgaggctgtcaatggtgtaagagaaatgagggctcctaaacactttcttcctgagatgttaagcaaagtaatcatcctgtcactagatagaagcgatgaagataaagaaaaagcaagttctttgatcagtttactcaaacaggaagggataggcacaagtgacaacttcatgcaggctttcctgaatgtattggaccagtgtcccaaactggaggttgacatccctttggtgaaatcctatttagcacagtttgcagctcgtgccatcatttcagagctggtgagcatttcagaactagctcaaccactagaaagtggcacccattttcctctcttcctactttgtcttcagcagttagctaaattacaagatcgagaatggttaacagaactttttcaacaaagcaaggtcaatatgcagaaaatgctcccagaaattgatcagaataaggaccgcatgttggagattttggaaggaaagggactgagtttcttattcccactcctcaaattggagaaggaactgttgaagcaaataaagttggatccatcccctcaaaccatatataaatggattaaagataacatctctcccaaacttcatgtagataaaggatttgtgaacatcttaatgactagcttcttacagtacatttctagtgaagtaaacccccccagcgatgaaacagattcatcctctgctccttccaaagaacagttagagcaggaaaaacaactactactatctttcaagccagtaatgcagaaatttcttcatgatcacgttgatctacaagtcagtgccctgtatgctctccaggtgcactgctataacagcaacttcccaaaaggcatgttacttcgcttttttgtgcacttctatgacatggaaattagtgaagaagaagctttcttggcttggaaagaagatataacccaagagtttccgggaaaaggcaaggctttgttccaggtgaatcagtggctaacctggttagaaactgctgaaggagaagaatcagaggaagaagctgactaaagaaccagccaaagccttaaattgtgcaaaacatactgttgctatgatgtaactgcatttgacctaaccactgcgaaaattcattccgctgtaatgttttcacaatatttaaagcagaagcacgtcagttaggatttccttctgcataaggtttttttgtagtgtaatgtcttaatcatagtctaccatcaaatattttaggagtatctttaatgtttagatagtatattagcagcatgcaataattacatcataagttctcaagcagaggcagtctattgcgaggaccttctttgctgccagttatcataggctgttttaagttagaaaactgaatagcaacactgaatactgtagaaatgcactttgctcagtaatacttgagttgttgcaatatttgattatccatttggttgttacagaaaaattcttaactgtaattgatggttgttgccgtaatagtatattgcctgtatttctacctctagtaatgggctttatgtgctagattttaatatccttgagcctgggcaagtgcacaagtctttttaaaagaaacatggtttacttgcaccaaactgatcagttttgagagatcgttaatgcccttgaagtggtttttgtgggtgtgaaacaaatggtgagaatttgaattggtccctcctattatagtattgaaattaagtctacttaatttatcaagtcatgttcatgccctgattttatatacttgtatctatcaataaacattgtga

SEQ ID NO: 13890 - protein, 907 aa, Homo sapiens
  ref <308>: DATABASE ACCESSION NUMBER: SWISS-Prot / AAC51166
  ref <309>: DATABASE ENTRY DATE: 2002-10-01
MESAIAEGGASRFSASSGGGGSRGAPQHYPKTAGNSEFLGKTPGQNAQKWIPARSTRRDDNSAANNSANEKERHDAIFRKVRGILNKLTPEKFDKLCLELLNVGVESKLILKGVILLIVDKALEEPKYSSLYAQLCLRLAEDAPNFDGPAAEGQPGQKQSTTFRRLLISKLQDEFENRTRNVDVYDKRENPLLPEEEEQRAIAKIKMLGNIKFIGELGKLDLIHESILHKCIKTLLEKKKRVQLKDMGEDLECLCQIMRTVGPRLDHERAKSLMDQYFARMCSLMLSKELPARIRFLLQDTVELREHHWVPRKAFLDNGPKTINQIRQDAVKDLGVFIPAPMAQGMRSDFFLEGPFMPPRMKMDRDPLGGLADMFGQMPGSGIGTGPGVIQDRFSPTMGRHRSNQLFNGHGGHIMPPTQSQFGEMGGKFMKSQGLSQLYHNQSQGLLSQLQGQSKDMPPRFSKKGQLNADEISLRPAQSFLMNKNQVPKLQPQITMIPPSAQPPRTQTPPLGQTPQLGLKTNPPLIQEKPAKTSKKPPPSKEELLKLTETVVTEYLNSGNANEAVNGVREMRAPKHFLPEMLSKVIILSLDRSDEDKEKASSLISLLKQEGIATSDNFMQAFLNVLDQCPKLEVDIPLVKSYLAQFAARAIISELVSISELAQPLESGTHFPLFLLCLQQLAKLQDREWLTELFQQSKVNMQKMLPEIDQNKDRMLEILEGKGLSFLFPLLKLEKELLKQIKLDPSPQTIYKWIKDNISPKLHVDKGFVNILMTSFLQYISSEVNPPSDETDSSSAPSKEQLEQEKQLLLSFKPVMQKFLHDHVDLQVSALYALQVHCYNSNFPKGMLLRFFVHFYDMEIIEEEAFLAWKEDITQEFPGKGKALFQVNQWLTWLETAEEEESEEEAD

SEQ ID NO: 13891 - DNA, 405 bp, Rattus norvegicus; identical to SEQ ID NO: 13887
  ref <308>: DATABASE ACCESSION NUMBER: EMBL / U95052
  ref <309>: DATABASE ENTRY DATE: 2000-03-04

SEQ ID NO: 13892 - protein, 907 aa, Rattus norvegicus; identical to SEQ ID NO: 13888
  ref <308>: DATABASE ACCESSION NUMBER: SWISS-Prot / AAC53095
  ref <309>: DATABASE ENTRY DATE: 2002-06-01

SEQ ID NO: 13893 - DNA, 3786 bp, Homo sapiens; identical to SEQ ID NO: 13889
  ref <308>: DATABASE ACCESSION NUMBER: EMBL / U76111
  ref <309>: DATABASE ENTRY DATE: 1999-07-01

SEQ ID NO: 13894 - protein, 907 aa, Homo sapiens; identical to SEQ ID NO: 13890
  ref <308>: DATABASE ACCESSION NUMBER: SWISS-Prot / AAC51166
  ref <309>: DATABASE ENTRY DATE: 2002-10-01

SEQ ID NO: 13895 - DNA, 1135 bp, Rattus norvegicus
  ref <308>: DATABASE ACCESSION NUMBER: EMBL / U95920
  ref <309>: DATABASE ENTRY DATE: 2000-03-04
gaagatcttcttgtggagatatctgaagtgttgtttaatgaattggctttctttaagctcatgcaagatttggataataacagcatagctgttaaacagagatgcaaaaggaaaattgaagcagctggagtgatacagtcttatgcaaaagaggccaaaaggattcttgaaggagatcgtggctcacctgctggagagattgatgatgaagacaaagacaaggatgagactgaaactgttaagcagactcagacttcagaagtatatgatgctaaaggtcccaaaaatgtaagatctgatgtttctgatcaagaggaagatgaagaaagtgaacggtgtccagtgtctatcaatctatctaaagcagaaagtcaggctttaactaattatggaagtggagaagatgagaatgaggatgaagaaatggaagaatttgaagagagtcctgtggatgttcagacttcgcttcaggctaacactgaaactacagaagaaaatgaacatgacaatcaggttctgcaacatgatcttgaaaaaacacaagaaagtacaaatgtaccatcagaccaagaaggaactagtaaaaatgatcaagacagctctcctgtgaaaccttgttatctcaatatcttggaaaatgaacagcatttaaacagtgctacccataaggactcactcactactattactgattcatctaaacagcctgaccctatgccattacccttgactgcaagtgaaaccctagtgcctagagtcaaagaagttaaatctgctcaggagactcccgagagctctctggctggaagtcctgacactgaatctccagtgttagtcaatgactacgaagcagaatctggtaacataagtcaaaagtctgatgaagaagactttgtgaaagttgaggacttgccactcaaactgacagtctgttcagaggcagagctgaggaagaaaatggtagaagaagaacagaaaaaccatttagctggtgagatatgtgaaatgcagactgaagaattagctggaaaccctcagatactgaaagaacctgaaacagtgggagcccagagtgtatgaaatgtctgcagaaactcatctaactcacttacatagtcagcacactaaaaaaaaa

SEQ ID NO: 13896 - protein, 359 aa, Rattus norvegicus
  ref <308>: DATABASE ACCESSION NUMBER: SWISS-Prot / AAB54066
  ref <309>: DATABASE ENTRY DATE: 2001-12-01
EDLLVEISEVLFNELAFFKLMQDLDNNSIAVKQRCKRKIEAAGVIQSYAKEAKRILEGDRGSPAGEIDDEDKDKDETETVKQTQTSEVYDAKGPKNVRSDVSDQEEDEESERCPVSINLSKAESQALTNYGSGEDENEDEEMEEFEESPVDVQTSLQANTETTEENEHDNQVLQHDLEKTQESTNVPSDQEGTSKNDQDSSPVKPCYLNILENEQHLNSATHKDSLTTITDSSKQPDPMPLPLTASETLVPRVKEVKSAQETPESSLAGSPDTESPVLVNDYEAESGNISQKSDEEDFVKVEDLPLKLTVCSEAELRKKMVEEEQKNHLAGEICEMQTEELAGNPQILKEPETVGAQSV

SEQ ID NO: 13897 - DNA, 6577 bp, Homo sapiens
  ref <308>: DATABASE ACCESSION NUMBER: EMBL / L27841
  ref <309>: DATABASE ENTRY DATE: 2000-03-04
tgccgcttccgcggtcacatgactccagtctagctcgcattgcgctcccgccggcgagttctccccgcgcgccgttgcgaggagacggcgcatgtccgccgcgcttgcccctctgcagtaccccgccctcttctccaccacaatgagatctaagtgcgtgctgcgcgtgcgtacgtgaggtcgaaaagcgcactgggacggcagccaggaaacgtgtgggcctctctgctgcggtctccgagggccgaccgctgccggcgcgggtcgtgcgggctgactgtcgctctgcctttgacaggagaggctgcttcttgtagaggaaacagctttgaagtgtggagcgggaaaggagcagtttctgagctgcaaaaactagtttctaaacagagagttaattgttaaatccagtatggccacaggaggaggtccctttgaagatggcatgaatgatcaggatttaccaaactggagtaatgagaatgttgatgacaggctcaacaatatggattggggtgcccaacagaagaaagcaaatagatcatcagaaaagaataagaaaaagtttggtgtagaaagtgataaaagagtaaccaatgatatttctccggagtcgtcaccaggagttggaaggcgaagaacaaagactccacatacgttcccacacagtagatacatgagtcagatgtctgtcccagagcaggcagaattagagaaactgaaacagcggataaacttcagtgatttagatcagagaagcattggaagtgattcccaaggtagagcaacagctgctaacaacaaacgtcagcttagtgaaaaccgaaagcccttcaactttttgcctatgcagattaatactaacaagagcaaagatgcatctacaagtcccccaaacagagaaacgattggatcagcacagtgtaaagagttgtttgcttctgctttaagtaatgacctcttgcaaaactgtcaggtgtctgaagaagatgggaggggagaacctgcaatggagagcagccagattgtaagcaggcttgttcaaattcgcgattatattactaaagctagttccatgcgggaagatcttgtagagaaaaatgagagatctgctaatgttgagcgccttactcatctaatagatcaccttaaagaacaagagaagtcatatatgaaatttcttaaaaaaatccttgccagagatcctcagcaggagcctatggaagagatagaaaatttgaagaaacaacatgatttattaaaaagaatgttacaacagcaggagcaactaagaggagctctacagggacggcaggctgcacttctagctctgcaacataaagcagacgaagctattgcagtgatggatgattctgttgttgcagaaactgcaggtagcttatctggcgtcagtatcacatctgaactaaatgaagaattgaatgacttaattcagcgttttcataatcagcttcgtgattctcagcctccagctgttccagacaatagaagacaggcagaaagtctttcattaactagggaggtttcccagagcaggaaaccatcagcttcagaacgtttacctgatgagaaagtcgaactttttagcaaaatgagagtgctacaggaaaagaaacaaaaaatggacaaattgcttggagaacttcatacacttcgagatcagcatcttaacaattcatcatcctctccacaaaggagtgtcgatcagagaagtacttcagctccctctgcttgtctaggcttggcaccggttgtcaatggagaatccaatagcctcacatcatctgttccttatcctactgcttctctagtatctcagaatgagagtgaaaacgaaggccacctcaatccatctgaaaaactccagaagttaaatgaagttcgaaagagattgaatgagctaagagaattagttcattattatgaacaaacgtcagacatgatgacagatgctgtgaatgaaaacaggaaagatgaagaaactgaagagtcagaatatgattctgagcatgaaaattccgagcctgttactaacattcgaaatccacaagtagcttccacttggaatgaagtaaatagtcatagtaatgcacagtgtgtttctaataatagagatgggcgaacagttaattctaattgtgaaattaacaacagatctgctgccaacataagggctctaaacgtgcctccttctttagattgtcgatataatagagaaggggaacaggagattcatgttgcacaaggtgaagatgatgaggaggaggaggaagaagcagaagaggagggagtcagtggagcttcattatctagtcacaggagcagtctggttgatgagcatccagaagatgctgaatttgaacagaagatcaaccgacttatggctgcaaaacagaaacttagacagttacaagatcttgttgctatggtacaggatgatgatgcagctcaaggagttatctctgccagtgcatcaaatttggatgatttctacccagcagaagaagacaccaagcaaaattcaaataacactagaggaaatgccaataaaacacagaaagatactggagtaaatgaaaaggcaagagagaaattttatgaggctaaactacagcagcaacagagagagctaaaacaattgcaggaagaaagaaagaaactgattgacattcacgagaaaattcaagcattgcaaacggcatgccctgacttacagctgtcagctgctagtgtgggtaactgtcctaccaaaaaatatatgccagctgttacttcaaccccaactgttaatcaacacgagaccagtacaagcaaatctgtttttgagcctgaagattcttcaatagtagataatgagttgtggtcagaaatgagaagacatgaaatgttgagggaggagctgcgacagagaagaaagcagcttgaagctctgatggctgaacatcagaggaggcaaggtctagctgaaactgcatctccagtggctgtgtcattgagaagtgatggatctgagaacctatgtactcctcagcaaagtagaacagaaaaaacgatggcaacttggggagggtctacccagtgtgcactagatgaagaaggagatgaagacggttacctttctgaaggaattgttcggacagatgaagaggaggaagaagagcaagatgccagttccaatgataacttttctgtgtgtccttctaacagtgtgaatcataactcctacaatcgaaaggaaactaaaaatacgtggaagaacaattgccctttttcggcagatgaaaattatcgtcctttagccaagacaaggcaacagaatatcagcatgcaacggcaagaaaaccttcgttgggtgtcagagctctcttacgtagaagagaaagaacaatggcaagaacaaatccagctaaagaaacagcttgattttagtgtcagtatttgtcagactttgatgcaagaccagcagactctatcttgtctgctacaaactcttctcacgggtccttacagtgttatgcccagcaatgttgcatctcctcaagtacacttcataatgcaccagttgaaccagtgctatactcagctaacatggcaacagaataatgttcagaggttgaaacaaatgctaaatgaacttatgcgccaacgaaatcagcatccagaaaaacctggaggcaaggaaagaggcagtagtgcatcgcaccctccttctcccagtttattttgtcctttcagctttccaacacagcctgtaaatctcttcaatatacctggatttactaacttttcatcatttgcaccaggtatgaatttcagccctttatttccttctaattttggagatttttctcagaatatctctacacccagtgaacagcagcaacccttagccagaattctttcaggaaaaacagaatatatggcttttccaaaaccttttgaaagcagttcctctattggagcagagaaaccaaggaataaaaaactgcctgaagaggaggtggaaagcagtaggacaccatggttatatgaacaagaaggtgaagtagagaaaccatttatcaagactggattttcagtgtctgtagaaaaatctacaagtagtaaccgcaaaaatcaattagatacaaacggaagaagacgccagtttgatgaagaatcactggaaagctttagcagtatgcctgatccagtagatccaacaacagtgactaaaacattcaagacaagaaaagcgtctgcacaggccagcctggcatctaaagataaaactcccaagtcaaaaagtaagaagaggaattctactcagctgaaaagcagagttaaaaacatcaggtatgaaagtgccagtatgtctagcacatgtgaaccttgcaaaagtaggaacagacattcagcccagactgaagagcctcttcaagcaaaagtattcagcagaaagaatcatgagcaactggaaaaaataataaaatgtaataggtctacagaaatatcttcagaaactgggagtgatttttccatgtttgaagctttgcaggatactatttattctgaagtagctacattaatttctcaaaatgaatctcgtccacattttcttattgaactcttccatgagctgcagctactaaacacagactacttgagacagagggctttatatgcattgcaggacatagtatccagacatatttctgagagccatgaaaaaggagaaaatgtaaagtcagtaaactctggtacttggatagcatcaaactcagaacttactcctagtgagagccttgctactactgatgatgaaacttttgagaagaactttgaaagagaaacccataaaataagtgagcaaaatgatgctgataatgctagtgtcctgtctgtatcatcaaattttgagccttttgcaacagatgatctaggtaacaccgtgattcacttagatcaagcattagccagaatgagagaatatgagcgtatgaagactgaggctgaaagtaactcaaatatgagatgcacctgcaggattattgaggatggagatggtgctggtgcaggtactacagttaataatttagaagaaactcccgttattgaaaatcgtagttcacaacaacctgtaagtgaagtttctaccatcccatgtcctagaattgatactcagcagctggaccggcaaattaaagcaattatgaaagaagtcattccttttttgaaggagcacatggatgaagtatgctcctcgcagcttctaacttcagtaaggcgcatggttttgacccttacccagcaaaatgatgagagcaaagagtttgtaaagttctttcataaacaacttggaagtatattacaggattcactggcaaaatttgctggcagaaaactgaaagactgtggagaagatcttcttgtagagatatctgaagtgttgttcaatgaattggctttctttaagcttatgcaagatttggataataatagtataactgttaaacagagatgcaaaaggaaaatagaagcaactggagtgatacaatcttgtgccaaagaggctaaaaggattcttgaagatcatggctcacctgctggagagattgatgatgaagacaaagacaaggatgaaactgaaacagttaagcagactcaaacatctgaggtgtatgatggtcccaaaaatgtaagatctgatatttctgatcaagaggaagatgaagaaagtgaaggatgtccagtgtctattaatttgtctaaagctgaaactcaggctttaactaattatggaagtggagaagatgaaaatgaggatgaagaaatggaagaatttgaagaaggccctgtggatgtccagacttccctccaggctaacactgaagctactgaagaaaatgaacatgatgaacaggtcctacaacgtgactttaaaaagacagcagaaagcaaaaatgtccattggaacgagaagccactagtaaaaatgaccaaaaataactgtcctgtgaaacccagttacctcaatatcttggaagatgagcaacctttaaatagtgctgcccataaggagtcacctcctactgttgattcaactcaacagcctaaccctttgccgttacgtttacctgaaatggaacccttagtgcctagagtcaaagaagttaaatctgctcaggaaactcctgaaagctctctggctggaagtcctgatactgaatctccagtgttagtgaatgactatgaagcagaatctggtaatataagtcaaaagtctgatgaagaagattttgtaaaagttgaagatttaccactgaaactgacaatatattcagaggcagatctaagaaagaaaatggtagaagaagaacagaaaaaccatttatctggtgaaatgtgtgaaatgcagaccgaagaattagctggaaattctgagacactaaaagaacctgaaacggtgggagcccagagtatatgagatgtcttcagaggctcatctaactctgtccttacatactcaatgcatatatgaaaacaatactaaataaacatctgatctgtataaaaatct

SEQ ID NO: 13898 - protein, 2025 aa, Homo sapiens
  misc_feature (1)..(2025): Xaa=Unknown amino acid
MATGGGPFEDGMNDQDLPNWSNENVDDRLNNMDWGAQQKKANRSSEKNKKKFGVESDKRVTNDISPESSPGVGRRRTKTPHTFPHSRYMSQMSVPEQAELEKLKQRINFSDLDQRSIGSDSQGRATAANNKRQLSENRKPFNFLPMQINTNKSKDASTSPPNRETIGSAQCKELFASALSNDLLQNCQVSEEDGRGEPAMESSQIVSRLVQIRDYITKASSMREDLVEKNERSANVERLTHLIDHLKEQEKSYMKFLKKILARDPQQEPMEEIENLKKQHDLLKRMLQQQEQLRGALQGRQAALLALQHKADEAIAVMDDSVVAETAGSLSGVSITSELNEELNDLIQRFHNQLRDSQPPAVPDNRRQAESLSLTREVSQSRKPSASERLPDEKVELFSKMRVLQEKKQKMDKLLGELHTLRDQHLNNSSSSPQRSVDQRSTSAPSACLGLAPVVNGESNSLTSSVPYPTASLVSQNESENEGHLNPSEKLQKLNEVRKRLNELRELVHYYEQTSDMMTDAVNENRKDEETEESEYDSEHENSEPVTNIRNPQVASTWNEVNSHSNAQCVSNNRDGRTVNSNCEINNRSAANIRALNVPPSLDCRYNREGEQEIHVAQGEDDEEEEEEAEEEGVSGASLSSHRSSLVDEHPEDAEFEQKINRLMAAKQKLRQLQDLVAMVQDDDAAQGVISASASNLDDFYPAEEDTKQNSNNTRGNANKTQKDTGVNEKAREKFYEAKLQQQQRELKQLQEERKKLIDIHEKIQALQTACPDLQLSAASVGNCPTKKYMPAVTSTPTVNQHETSTSKSVFEPEDSSIVDNELWSEMRRHEMLREELRQRRKQLEALMAEHQRRQGLAETASPVAVSLRSDGSENLCTPQQSRTEKTMATWGGSTQCALDEEGDEDGYLSEGIVRTDEEEEEEQDASSNDNFSVCPSNSVNHNSYNRKETKNTWKNNCPFSADENYRPLAKTRQQNISMQRQENLRWVSELSYVEEKEQWQEQIQLKKQLDFSVSICQTLMQDQQTLSCLLQTLLTGPYSVMPSNVASPQVHFIMHQLNQCYTQLTWQQNNVQRLKQMLNELMRQRNQHPEKPGGKERGSSASHPPSPSLFCPFSFPTQPVNLFNIPGFTNFSSFAPGMNFSPLFPSNFGDFSQNISTPSEQQQPLARILSGKTEYMAFPKPFESSSSIGAEKPRNKKLPEEEVESSRTPWLYEQEGEVEKPFIKTGFSVSVEKSTSSNRKNQLDTNGRRRQFDEESLESFSSMPDPVDPTTVTKTFKTRKASAQASLASKDKTPKSKSKKRNSTQLKSRVKNIRYESASMSSTCEPCKSRNRHSAQTEEPLQAKVFSRKNHEQLEKIIKCNRSTEISSETGSDFSMFEALQDTIYSEVATLISQNESRPHFLIELFHELQLLNTDYLRQRALYALQDIVSRHISESHEKGENVKSVNSGTWIASNSELTPSESLATTDDETFEKNFERETHKISEQNDADNASVLSVSSNFEPFATDDLGNTVIHLDQALARMREYERMKTEAESNSNMRCTCRIIEDGDGAGAGTTVNNLEETPVIENRSSQQPVSEVSTIPCPRIDTQQLDRQIKAIMKEVIPFLKEHMDEVCSSQLLTSVRRMVLTLTQQNDESKEFVKFFHKQLGSILQDSLAKFAGRKLKDCGEDLLVEISEVLFNELAFFKLMQDLDNNSITVKQRCKRKIEATGVIQSCAKEAKRILEDHGSPAGEIDDEDKDKDETETVKQTQTSEVYDGPKNVRSDISDQEEDEESEGCPVSINLSKAETQALTNYGSGEDENEDEEMEEFEEGPVDVQTSLQANTEATEENEHDEQVLQRDFKKTAESKNVHWNEKPLVKMTKNNCPVKPSYLNILEDEQPLNSAAHKESPPTVDSTQQPNPLPLRLPEMEPLVPRVKEVKSAQETPESSLAGSPDTESPVLVNDYEAESGNISQKSDEEDFVKVEDLPLKLTIYSEADLRKKMVEEEQKNHLSGEMCEMQTEELAGNSETLKEPETVGAQSIX

SEQ ID NO: 13899 - DNA, 3361 bp, Rattus norvegicus
  ref <308>: DATABASE ACCESSION NUMBER: EMBL / X00975
  ref <309>: DATABASE ENTRY DATE: 1995-05-22
acactgcagtccccttttgggagaaagaacatcccttcctacctaggtcctaacagacttgcatcccaagacctcctcccccctcccttccttgactccagctgctgcaggcctccaagaaaggagaggcccctgagctgggcattttagtatctggggtgggtatccacagggctaaggttaccacggtatgttaaggggcaggactatataaccccagaagaactgccccaagcagattctctgctttttccatctggagctactgccttgccctcagaggatctaagacatggtgagtgaagacccccccaacacacacacacacacacacacacacacacacacacacacacacagagagagagagagagttagctcaggatagcctcacccttcagaaaaaaaaaaagttgttgcttctcattccaactacaggtaaaatgtgaactgtctctcttagcaaaccagaataaggccagatagagtgatgggctgaagggttcagtcaaggttaatatgctcagatatccaaccgtgatgtatgggggtagggggtagacgtgctcaaagtctgttccgtccctttctgtactttcttaaagtgctcagaccagtgagatgaccctgctcacattttgtaagtgaaaacttgaggttcagatagggtcaacgagtagactaagctagcaattatggacgccaagttggcaggtggagggtcctgagaaaggtacttgccagccaggatgaagcgatctgggagctatagttgggatttaaagatgaagccaaaatgaggccccttagccaagaggtaccaagaaaaagaagagttgttttagaaaaagggactcagagaactctgaatcttaatctgactaggtatggagggtatgcccataatttcaactactttcaagcctgaggaggtagggtcactggagtcctggagttcaaggccagcatgagaaatgtaaggagaccctgttgcaaaaaaaaaaagaggagaagcaaggtgtggtaaggaatatctttaatctcaaggaaagcatgggtctatataataggtccaagggctaaatcatgagactgtgtctacagggggtggggagattggggtcggggatgtaactcggttggttgtgttagcctagcgtgcacaagcaaccaaataaaataggatgtggctgcacaagatgctaaccctggtacttgcacaatcaaggttagagatggaggcaagatgagcagatcaaggtcatcctcagttaagtagcaagtttgaggggtaggtgagaacccctctttaacagaaacaaaagtttggtttgttgctcccaggagagagttacatgaactgacctgtagactctcctgctcaacctttaccctcacaggcacccaagaaggccaagagaagggcagcagcagaagggagctccaatgttttctccatgtttgaccagactcagatccaggagttcaaggaggtgagagagagaggctaaggaaagcccctccaccctcctccccacccctcctctccatccctcctccccacccctcctccccagaaagtgcacctgttgagggagaaggagggtttagaattcctcccctccctgcggaagggtggagggagacagctggctcagggccagaatctgatctgccttgggccaattcctggcttcatctgtccccacccctacccttccacaggctttcactgtaattgatcagaacagggatggcattattgacaaggaggatcttcgggacacctttgcggccatgggtgagctccctactcccatctgtaaatgttgaaagctatggagtcggaggggaatccagtggcttcaggcattaatctgcccagatgaaaaatgaatgagctgatataagtttatggaaagcacagctctggtccccagcatccaactgcaacccctggtgctcaccccattcaggccgtctcaatgtgaagaatgaggaactcgacgccatgatgaaggaagccagtgggcctatcaacttcactgtcttcctgaccatgtttggggagaagctgaagggtgagtaaaaggttctcagtccaagaccgtagttgctcctcccagaacttcagggacctgctagactcatgtgccctctgaccctgcaggtgcggaccccgaggatgtgatcactggagccttcaaggtcctggacccagaagggaagggcaccatcaaaaagcaattgtgagtggctccctctagtggctctactgtaggcttctaaaatccttgcataagggtgaccggttgacagaccgtgtgagcaataggggcctgggtggccaggttaaattttcttttcttttttcttttcttttcttttttttttttttttttcggagctggggaccgaacccagggccttgcgcttgctaggcaagagctctaccactgagctaaatccccaacccccaagttacattttcataataactaagggaagaaattcgagacaggcggacacagcatttgggagatgcaccaaacatgtttcagggaggaaggttgatgggaacaagagtgaaatgaggggggacaggactcatgaacccaatctcacctccctgaatgtcaccttctcagcttggaggagctgcttaccacgcagtgcgaccgattttcccaggaggaggtgagcaggggagagcccagggaggaaaaggactcggagtggaagtaagtggaagtgaggaaagcagtgggagtcggaagacccgttttagacctactcctgtcttcctacagatcaagaatatgtgggcagccttccctccagatgtgggcggcaacgtggactacaagaacatctgctatgtcatcacacacggtgacgctaaggaccaggaataggggacccgaggtctcagaagacccagataggcttgtagccgcaccaactctcaccctgaccccccaataaaagtcaactggtctttgtttcttactggtggcaatttcagtgggttcactcacgaactcaggtgggaggccgaagcaccgcccagcaagacaggagtggctaacaggtggaatgactagtggccaggaggcctccaaagtgcagttccattcctgctgggaagaagattcgggcaactgggggaggcagggacgagttttattagatggagaacttggaggaacgctaaaacccaagtggaacctgccgttaagcgtttggagggcagccctctcagaacagtatagaaggcggagtcggctgggccttaaacttccgaattggaggcacctgattaaagtgcaagggccggcctaccctctgggtcttcgttggg

SEQ ID NO: 13900 - protein, 168 aa, Rattus norvegicus
  ref <308>: DATABASE ACCESSION NUMBER: SWISS-Prot / P04466
  ref <309>: DATABASE ENTRY DATE: 2001-10-16
APKKAKRRAAAEGSSNVFSMFDQTQIQEFKEAFTVIDQNRDGIIDKEDLRDTFAAMGRLNVKNEELDAMMKEASGPINFTVFLTMFGEKLKGADPEDVITGAFKVLDPEGKGTIKKQFLEELLTTQCDRFSQEEIKNMWAAFPPDVGGNVDYKNICYVITHGDAKDQE

SEQ ID NO: 13901 - DNA, 662 bp, Homo sapiens
  ref <308>: DATABASE ACCESSION NUMBER: EMBL / M21812
  ref <309>: DATABASE ENTRY DATE: 1999-07-02
ctgactccttgcttctttccagccggtgccgctgccttgccccccggagactgaagacatggcacccaagagggccaagagaaggacagtagcagagggcggaagctccagcgtcttctccatgttcgaccagactcagatccaggagttcaaagaggccttcactgtgatcgaccagaaccgtgatggtattatagacaaggaggaccttcgggacaccttcgcagccatgggccgcctcaatgtgaagaatgaggagttggatgccatgatgaaggaagccagcggtcccatcaacttcaccgtcttcctgaccatgttcggggagaagctcaagggtgccgaccctgaggatgtgatcaccggagccttcaaggtcttggaccctgagggaaagggcaccatcaagaagaagttcctggaggagctgctgaccacgcagtgtgaccgcttctcccaggaggagatcaagaacatgtgggcggccttcccccccgacgtgggcggcaacgtcgactacaaaaacatctgctacgtcatcacgcacggcgacgccaaggaccaggagtaggggcacccgcgggcctccgctgcccgacgcttctgttcggcccgacctccaccccggctcccaataaaatttaactgatctttgtttctta

SEQ ID NO: 13902 - protein, 170 aa, Homo sapiens
  ref <308>: DATABASE ACCESSION NUMBER: SWISS-Prot / AAA91848
  ref <309>: DATABASE ENTRY DATE: 2003-02-01
MAPKRAKRRTVAEGGSSSVFSMFDQTQIQEFKEAFTVIDQNRDGIIDKEDLRDTFAAMGRLNVKNEELDAMMKEASGPINFTVFLTMFGEKLKGADPEDVITGAFKVLDPEGKGTIKKKFLEELLTTQCDRFSQEEIKNMWAAFPPDVGGNVDYKNICYVITHGDAKDQE

SEQ ID NO: 13903 - DNA, 3361 bp, Rattus norvegicus; identical to SEQ ID NO: 13899
  ref <308>: DATABASE ACCESSION NUMBER: EMBL / X00975
  ref <309>: DATABASE ENTRY DATE: 1995-05-22

SEQ ID NO: 13904 - protein, 168 aa, Rattus norvegicus; identical to SEQ ID NO: 13900
  ref <308>: DATABASE ACCESSION NUMBER: SWISS-Prot / P04466
  ref <309>: DATABASE ENTRY DATE: 2001-10-16

SEQ ID NO: 13905 - DNA, 662 bp, Homo sapiens; identical to SEQ ID NO: 13901
  ref <308>: DATABASE ACCESSION NUMBER: EMBL / M21812
  ref <309>: DATABASE ENTRY DATE: 1999-07-02

SEQ ID NO: 13906 - protein, 170 aa, Homo sapiens; identical to SEQ ID NO: 13902
  ref <308>: DATABASE ACCESSION NUMBER: SWISS-Prot / AAA91848
  ref <309>: DATABASE ENTRY DATE: 2003-02-01

SEQ ID NO: 13907 - DNA, 3361 bp, Rattus norvegicus; identical to SEQ ID NO: 13899
  ref <308>: DATABASE ACCESSION NUMBER: EMBL / X00975
  ref <309>: DATABASE ENTRY DATE: 1995-05-22

SEQ ID NO: 13908 - protein, 168 aa, Rattus norvegicus; identical to SEQ ID NO: 13900
  ref <308>: DATABASE ACCESSION NUMBER: SWISS-Prot / P04466
  ref <309>: DATABASE ENTRY DATE: 2001-10-16

SEQ ID NO: 13909 - DNA, 662 bp, Homo sapiens; identical to SEQ ID NO: 13901
  ref <308>: DATABASE ACCESSION NUMBER: EMBL / M21812
  ref <309>: DATABASE ENTRY DATE: 1999-07-02

SEQ ID NO: 13910 - protein, 170 aa, Homo sapiens; identical to SEQ ID NO: 13902
  ref <308>: DATABASE ACCESSION NUMBER: SWISS-Prot / AAA91848
  ref <309>: DATABASE ENTRY DATE: 2003-02-01

SEQ ID NO: 13911 - DNA, 3361 bp, Rattus norvegicus; identical to SEQ ID NO: 13899
  ref <308>: DATABASE ACCESSION NUMBER: EMBL / X00975
  ref <309>: DATABASE ENTRY DATE: 1995-05-22

SEQ ID NO: 13912 - protein, 168 aa, Rattus norvegicus; identical to SEQ ID NO: 13900
  ref <308>: DATABASE ACCESSION NUMBER: SWISS-Prot / P04466
  ref <309>: DATABASE ENTRY DATE: 2001-10-16

SEQ ID NO: 13913 - DNA, 662 bp, Homo sapiens; identical to SEQ ID NO: 13901
  ref <308>: DATABASE ACCESSION NUMBER: EMBL / M21812
  ref <309>: DATABASE ENTRY DATE: 1999-07-02

SEQ ID NO: 13914 - protein, 170 aa, Homo sapiens; identical to SEQ ID NO: 13902
  ref <308>: DATABASE ACCESSION NUMBER: SWISS-Prot / AAA91848
  ref <309>: DATABASE ENTRY DATE: 2003-02-01

SEQ ID NO: 13915 - DNA, 3361 bp, Rattus norvegicus; identical to SEQ ID NO: 13899
  ref <308>: DATABASE ACCESSION NUMBER: EMBL / X00975
  ref <309>: DATABASE ENTRY DATE: 1995-05-22

SEQ ID NO: 13916 - protein, 168 aa, Rattus norvegicus; identical to SEQ ID NO: 13900
  ref <308>: DATABASE ACCESSION NUMBER: SWISS-Prot / P04466
  ref <309>: DATABASE ENTRY DATE: 2001-10-16

SEQ ID NO: 13917 - DNA, 662 bp, Homo sapiens; identical to SEQ ID NO: 13901
  ref <308>: DATABASE ACCESSION NUMBER: EMBL / M21812
  ref <309>: DATABASE ENTRY DATE: 1999-07-02

SEQ ID NO: 13918 - protein, 170 aa, Homo sapiens; identical to SEQ ID NO: 13902
  ref <308>: DATABASE ACCESSION NUMBER: SWISS-Prot / AAA91848
  ref <309>: DATABASE ENTRY DATE: 2003-02-01

SEQ ID NO: 13919 - DNA, 3361 bp, Rattus norvegicus; identical to SEQ ID NO: 13899
  ref <308>: DATABASE ACCESSION NUMBER: EMBL / X00975
  ref <309>: DATABASE ENTRY DATE: 1995-05-22

SEQ ID NO: 13920 - protein, 168 aa, Rattus norvegicus; identical to SEQ ID NO: 13900
  ref <308>: DATABASE ACCESSION NUMBER: SWISS-Prot / P04466
  ref <309>: DATABASE ENTRY DATE: 2001-10-16

SEQ ID NO: 13921 - DNA, 662 bp, Homo sapiens; identical to SEQ ID NO: 13901
  ref <308>: DATABASE ACCESSION NUMBER: EMBL / M21812
  ref <309>: DATABASE ENTRY DATE: 1999-07-02

SEQ ID NO: 13922 - protein, 170 aa, Homo sapiens; identical to SEQ ID NO: 13902
  ref <308>: DATABASE ACCESSION NUMBER: SWISS-Prot / AAA91848
  ref <309>: DATABASE ENTRY DATE: 2003-02-01

SEQ ID NO: 13923 - DNA, 1592 bp, Rattus norvegicus; identical to SEQ ID NO: 9219
  ref <308>: DATABASE ACCESSION NUMBER: EMBL / X03369
  ref <309>: DATABASE ENTRY DATE: 1993-09-12

SEQ ID NO: 13924 - protein, 445 aa, Rattus norvegicus; identical to SEQ ID NO: 9220
  ref <308>: DATABASE ACCESSION NUMBER: SWISS-Prot / CAA27067
  ref <309>: DATABASE ENTRY DATE: 1999-07-15

SEQ ID NO: 13925 - DNA, 1261 bp, Rattus norvegicus
  ref <308>: DATABASE ACCESSION NUMBER: EMBL / X04310
  ref <309>: DATABASE ENTRY DATE: 1995-03-21
ggagccctgaggagaacaggtgtctcaaagagcgccaagatgcagccatggctctggctggtcttcagtgtgaagctatcagctctctggggcagctctgccctccttcagactccttcatccctgctggttcaaaccaaccaaacagcaaaaatgtcctgtgaggctaaaaccttccctaaaggaacaaccatctactggctgagagagctccaggattccaacaagaacaagcactttgagttcctggcgtcccggacttcaaccaaaggaattaaatatggtgaaagggtgaagaagaatatgactctgtctttcaattcaaccctgccctttctcaagatcatggatgtgaagccagaggacagtggcttctacttctgcgcgatggttgggagtcccatggtagtctttgggacagggacaaagctgactgtggttgatgtccttcctacaactgctccaaccaaaaagactacactgaagaagaaacaatgtccaaccccccacccaaagacccagaaaggcttgacatgtggcctcattaccctcagcctgctggtggcctgcatcctggttctgctggtatccctcagtgtggccatccactttcactgcatgcggaggagagcccggattcacttcatgaaacagtttcacaaatgatccgcgcccacgacactgacagcctgctacaaaggactcaatataaagcaagacctggaccaacgagagacgacgcatttagctcaagctgtctgcctgaactgctgcaagtcctgtgaatggtcaggcacgttacctggagtctcacagagaaggccccagaatccaggctcactcacggagtgtgctgaagaaccaagaactcccaccatgacacccctgtggcttttgtacccttcttggactggaccttggatggcagccttgcagccaccatctttgtaagttgcttggtagggcagcatgactggctttttggcgtctcatgggagagagctaggtggcagccctgcagaagactgcacatcctcacacagagaggccacctcatgaataaggtttcctgcaaacatcttctgggcccttggcagccatcttgctctctcaggccttgctgtggttttgggaagctgttggctcagaagacagacttctacttcatctcctagtaggaaatttcttaagcttcttctccctcgtggcttatatatttcttccctcactctctgtcctttttatgaaaatgtcctggatc

SEQ ID NO: 13926 - protein, 208 aa, Rattus norvegicus
  ref <308>: DATABASE ACCESSION NUMBER: SWISS-Prot / CAA27850
  ref <309>: DATABASE ENTRY DATE: 2002-06-15
MQPWLWLVFSVKLSALWGSSALLQTPSSLLVQTNQTAKMSCEAKTFPKGTTIYWLRELQDSNKNKHFEFLASRTSTKGIKYGERVKKNMTLSFNSTLPFLKIMDVKPEDSGFYFCAMVGSPMVVFGTGTKLTVVDVLPTTAPTKKTTLKKKQCPTPHPKTQKGLTCGLITLSLLVACILVLLVSLSVAIHFHCMRRRARIHFMKQFHK

SEQ ID NO: 13927 - DNA, 1411 bp, Homo sapiens
  ref <308>: DATABASE ACCESSION NUMBER: Refseq / NM_004931
  ref <309>: DATABASE ENTRY DATE: 2000-11-01
gcgactgtctccgccgagcccccggggccaggtgtcccgggcgcgccacgatgcggccgcggctgtggctcctcctggccgcgcagctgacagttctccatggcaactcagtcctccagcagacccctgcatacataaaggtgcaaaccaacaagatggtgatgctgtcctgcgaggctaaaatctccctcagtaacatgcgcatctactggctgagacagcgccaggcaccgagcagtgacagtcaccacgagttcctggccctctgggattccgcaaaagggactatccacggtgaagaggtggaacaggagaagatagctgtgtttcgggatgcaagccggttcattctcaatctcacaagcgtgaagccggaagacagtggcatctacttctgcatgatcgtcgggagccccgagctgaccttcgggaagggaactcagctgagtgtggttgatttccttcccaccactgcccagcccaccaagaagtccaccctcaagaagagagtgtgccggttacccaggccagagacccagaagggcccactttgtagccccatcacccttggcctgctggtggctggcgtcctggttctgctggtttccctgggagtggccatccacctgtgctgccggcggaggagagcccggcttcgtttcatgaaacaattttacaaataagcagagaatacggttttggtgtcctgctacaaaaagacatcggtcagtaatgagcacgatgtggaaaaatgagagaagggacacattcaaccctggagagttcaatggctgctgaagctgcctgcttttcactgctgcaaggcctttctgtgtgtgatgtgcatgggagcaacttgttcgtgggtcatcgggaatactagggagaaggtttcattgcccccagggcacttcacagagtgtgctggaggactgagtaagaaatgctgcccatgccaccgcttccggctcctgtgctttccctgaactgggacctttagtggtggccatttagccaccatctttgcaggttgctttgccctggtagggcagtaacattgggtcctgggtctttcatggggtgatgctgggctggctccctcttggtcttcccaggctggggctgaccttcctcgcagagaggccaggtgcaggttgggaatgaggcttgctgagaggggctgtccagttcccagaaggcatatcagtctctgagggcttcctttggggccgggaacttgcgggtttgaggataggagttcacttcatcttctcagctcccatttctactcttaagtttctccccatttctactcttaagtttctcagctcccatttctactctcccatggcttcatgcttctttcatttttctgtttgttttatacaaatgtgttagttgtacaaataaa

SEQ ID NO: 13928 - protein, 210 aa, Homo sapiens
  ref <308>: DATABASE ACCESSION NUMBER: Refseq / NP_004922
  ref <309>: DATABASE ENTRY DATE: 2000-11-01
MRPRLWLLLAAQLTVLHGNSVLQQTPAYIKVQTNKMVMLSCEAKISLSNMRIYWLRQRQAPSSDSHHEFLALWDSAKGTIHGEEVEQEKIAVFRDASRFILNLTSVKPEDSGIYFCMIVGSPELTFGKGTQLSVVDFLPTTAQPTKKSTLKKRVCRLPRPETQKGPLCSPITLGLLVAGVLVLLVSLGVAIHLCCRRRRARLRFMKQFYK

SEQ ID NO: 13929 - DNA, 1840 bp, Rattus norvegicus
  ref <308>: DATABASE ACCESSION NUMBER: EMBL / X15734
  ref <309>: DATABASE ENTRY DATE: 1993-09-12
cgagaaactacaggcaaactttcagctttgaagttgtcaccttggagaagtgaagtcgagaagtgtgacaccatgaatggacctgtggatggcttgtgtgaccattctctaagtgaagagggagccttcatgttcacatctgaatcggtaggagaagggcatccagataagatctgtgaccagattagtgatgcagtgctggatgcccatctcaagcaagaccccaatgccaaggtggcctgtgagacagtgtgcaagacagggatggtgctcctgtgtggagagatcacctcaatggccatgattgactaccagcgggtggtgagagacaccattaagcacattggctacgatgactctgccaagggcttcgacttcaagacctgcaatgtgctcgtggctctggagcaacagtccccagacattgcccaatgtgtccatctagacagaaatgaggaggacgttggtgcaggagatcagggtctgatgttcggctatgccactgacgagacagaggagtgcatgccgctcaccattgttcttgctcacaaactcaacacccggatggcagatctgaggcgctctggtgtccttccctggctgagacctgattctaagactcaggtaacagttcagtacgtgcaggataatggtgctgtcatccctgttcgcgtccacaccatcgtcatctctgtgcaacacaacgaagacataacactggaggccatgcgagaggccctgaaggagcaggtgatcaaagctgtggtgccagccaagtacctggatgaagacaccatctaccacctgcagccaagtgggcggtttgtcatcggaggtccccagggggatgcaggtgtcacaggccgcaagattattgtggacacatacggaggctggggtgcccatggtggtggtgccttctctggaaaggactacaccaaggtggaccgctcagcagcttatgccgcccgctgggtggccaagtctctggtgaaggctgggctctgccggagagtccttgttcaggtgtcctatgccattggtgtggcagaacctctgtccatttccattttcacctacggaacttccaagaagaccgagcgagacgagctactagaggttgtgaacaagaactttgacctccggccgggtgttattgtcagggacttggatctgaagaagcccatctaccagaagactgcatgctatggtcatttcggaagaagcgagtttccctgggaggtccccaagaagcttgtgttttagagctgccgggaagcttagctctgtcctatactcaacctcctcaagatctcaactccctggtctcagagagccctccctgcttcccaccctatgcaaagccagcttcctccgattttccccctacccggcaatctgcaaacatcttaatagtggcaaggcaggtggtttctggtgctaggtcatcaggtctccttgcaaggatagtcagtgttccctccctgtctctcagatgacaacaatgttaattttgtgtaaaagttgctcctgtcatcccctcccgtagtctgaagctaaccaggccatctcttcctccgtcctggacatgtgcccagatgaatgttttgtcccatatctctggcttcccctttacattggcagccagaggtcctgagccggggcttcctcagggtccctctgagactgggcatctgctccctaggatatggtcagtgtcccctgaacatctgcattctgtgagggactgagctgtgtgttcttcatcccaacacaataaggtggtatcgtcattatccacagtgacagatggggaaactgaggctcagagagcgagctc

SEQ ID NO: 13930 - protein, 397 aa, Rattus norvegicus
  ref <308>: DATABASE ACCESSION NUMBER: SWISS-Prot / P13444
  ref <309>: DATABASE ENTRY DATE: 2002-06-15
MNGPVDGLCDHSLSEEGAFMFTSESVGEGHPDKICDQISDAVLDAHLKQDPNAKVACETVCKTGMVLLCGEITSMAMIDYQRVVRDTIKHIGYDDSAKGFDFKTCNVLVALEQQSPDIAQCVHLDRNEEDVGAGDQGLMFGYATDETEECMPLTIVLAHKLNTRMADLRRSGVLPWLRPDSKTQVTVQYVQDNGAVIPVRVHTIVISVQHNEDITLEAMREALKEQVIKAVVPAKYLDEDTIYHLQPSGRFVIGGPQGDAGVTGRKIIVDTYGGWGAHGGGAFSGKDYTKVDRSAAYAARWVAKSLVKAGLCRRVLVQVSYAIGVAEPLSISIFTYGTSKKTERDELLEVVNKNFDLRPGVIVRDLDLKKPIYQKTACYGHFGRSEFPWEVPKKLVF

SEQ ID NO: 13931 - DNA, 1487 bp, Homo sapiens
  ref <308>: DATABASE ACCESSION NUMBER: EMBL / D49357
  ref <309>: DATABASE ENTRY DATE: 1999-01-21
gtggagaagtgtgagaagatgaatggaccggtggatggcttgtgtgaccactctctaagtgaaggagtcttcatgttcacatcggagtctgtgggagagggacacccggataagatctgtgaccagatcagtgatgcagtgctggatgcccatctcaagcaagaccccaatgccaaggtggcctgtgagacagtgtgcaagaccggcatggtgctgctgtgtggtgagatcacctcaatggccatggtggactaccagcgggtggtgagggacaccatcaagcacatcggctacgatgactcagccaagggctttgacttcaagacttgcaacgtgctggtggctttggagcagcaatccccagatattgcccagtgcgtccatctggacagaaatgaggaggatgtgggggcaggagatcagggtttgatgttcggctatgccaccgacgagacagaggagtgcatgcccctcaccatcatccttgctcacaagctcaacgcccggatggcagacctcaggcgctccggcctcctcccctggctgcggcctgactctaagactcaggtgacagttcagtacatgcaggacaatggcgcagtcatccctgtgcgcatccacaccatcgtcatctctgtgcagcacaacgaagacatcacgctggaggagatgcgcagggccctgaaggagcaagtcatcagggccgtggtgccggccaagtacctggacgaagacaccgtctaccacctgcagcccagtgggcggtttgtcatcggaggtccccagggggatgcgggtgtcactggccgtaagattattgtggacacctatgcggcctggggggctcatggtggtggggccttctctgggaaggactacaccaaggtggaccgctcagccgcatatgctgcccgctgggtggccaagtctctggtgaaagcagggctctgccggagagtgcttgtccaggtttcctatgccattggtgtggccgagccgctgtccatttccatcttcacctacggaacctctcagaagacagagcgagagctgctggatgtggtgcataagaacttcgacctccggccgggcgtcattgtcagggacttggatttgaagaagcccatctaccagaagacagcatgctacggccatttcggaagaagcgagttcccatgggaggttcccaggaagcttgtattttagagccagggggagctgggcctggtctcaccctggaggcaactggtggccatgctcctcttccccagacgcctggctgctgatcgccttccccacccaccaaccctcagggcaaagccaggtccctctcatttagcctgtcctgtcatcatcatggccagctggaggcaggggcttcctggtgctggaggttggatcttgatgtaaggatgggcatggtgttctcctgctgctccctcagactggggcaatgttaatttagtggaaaaggcacccccgtcaag

SEQ ID NO: 13932 - protein, 395 aa, Homo sapiens
  ref <308>: DATABASE ACCESSION NUMBER: SWISS-Prot / Q00266
  ref <309>: DATABASE ENTRY DATE: 2002-06-15
MNGPVDGLCDHSLSEGVFMFTSESVGEGHPDKICDQISDAVLDAHLKQDPNAKVACETVCKTGMVLLCGEITSMAMVDYQRVVRDTIKHIGYDDSAKGFDFKTCNVLVALEQQSPDIAQCVHLDRNEEDVGAGDQGLMFGYATDETEECMPLTIILAHKLNARMADLRRSGLLPWLRPDSKTQVTVQYMQDNGAVIPVRIHTIVISVQHNEDITLEEMRRALKEQVIRAVVPAKYLDEDTVYHLQPSGRFVIGGPQGDAGVTGRKIIVDTYGGWGAHGGGAFSGKDYTKVDRSAAYAARWVAKSLVKAGLCRRVLVQVSYAIGVAEPLSISIFTYGTSQKTERELLDVVHKNFDLRPGVIVRDLDLKKPIYQKTACYGHFGRSEFPWEVPRKLVF

SEQ ID NO: 13933 - DNA, 1981 bp, Rattus norvegicus
  ref <308>: DATABASE ACCESSION NUMBER: EMBL / X16554
  ref <309>: DATABASE ENTRY DATE: 1993-09-12
caacgcggttctgttggtgttcaggttccctactgacttcccttccagtggcagcggcggaggcggcagtggcagcggcaagcactgagcacgtttgggtagttgtccaagatgccgaatatcaaaatcttcagcgggagctcccaccaggacttatcccagaaaattgctgaccgcctgggcctggagctaggcaaggtggtgactaagaaattcagcaaccaggagacctgtgtggaaattggggagagtgttcgtggagaggatgtctacattgttcagagtggctgcggtgagataaatgacaatctaatggagcttttgatcatgatcaatgcttgcaagatcgcttctgccagccgggttactgcggtcatcccatgcttcccttatgcccggcaggataagaaggataagagccgggctccaatctcagctaagcttgttgcaaatatgctatctgtagcaggtgcggatcatattatcaccatggatctacatgcatctcagattcagggcttctttgatatcccagtggacaatttatacgcagagccagctgtcctgaagtggattcgggagaacatatctgagtggagaaactgtactattgtctcacctgacgctggcggagccaagagagtgacctccattgcagaccgattgaatgtggattttgctttgattcacaaagaacggaagaaggccaatgaagtggaccgcatggtactagtaggagatgtgaaggatcgtgtggctatacttgtggatgacatggctgacacttgtggtacaatttgtcatgctgctgacaaacttctctcagctggagctaccagagtttatgccattttgacgcatgggatcttttctggtccagccatttctcgcatcaacaatgcatgctttgaagcagtagtagttaccaataccatacctcaggaggacaagatgaaacactgctccaaaatccaggtgatcgacatctctatgatccttgcagaagccatcaggagaacccacaatggagaatctgtctcctacctgttcagccatgttcctctataatatcataaattctgaagcgttttcaaaatgaaaccacccccaccccttgtttttcttgtatttggtgagttgggcagaagagccagcttgcttcagtgtagctttttacagcccacattagctacattaggatttatcctaattggagaaagacagactgctattaactgctaggacaccctacgtgcattgttgcagcctggctttcttgtttattttgtgatccttgcagctttaaattgagttccactgttgaaagctgcatagactgttaaaagagagagtattccccaaggtccttaggatggaattgtggagctcatactccattgcatgtgaaggctttggagtttccttcattcagaataactagcgacaaagccagccctcgtgtgatacattttcagaggtgtatgctacactgcagcaagttccctgtgcatccttaaacagagttcgcctgctgagcaccctgtacggcaggggcgggtagctcaatgcagtaatcaatttttgggaggaagaagcctgatctattatcatctgtttaattctctgtagcttggattctctatgcctattcctttcctgttggcttcaccttcagctatctcgaccctttcctggacaaatatcttgaactcagtgatcattgtttgtgacaaaattttctgtaagacagacttgcttcttgctatgtaactgctaacgttgacattaggtaacttgctatagcacaatcttccttagcccgctctctctgagttagtgggttttaggtggtgtgtgtgtcgtagtgccttttgattaatttaagtatttaatttttatcttccttcgatctgtttggcttaacaatttgatcttattgtctcatgtagaagaaacttaataaaatgtctgtcatgtgtac

SEQ ID NO: 13934 - protein, 317 aa, Rattus norvegicus
  ref <308>: DATABASE ACCESSION NUMBER: SWISS-Prot / KIRTR1
  ref <309>: DATABASE ENTRY DATE: 2002-06-15
PNIKIFSGSSHQDLSQKIADRLGLELGKVVTKKFSNQETCVEIGESVRGEDVYIVQSGCGEINDNLMELLIMINACKIASASRVTAVIPCFPYARQDKKDKSRAPISAKLVANMLSVAGADHIITMDLHASQIQGFFDIPVDNLYAEPAVLKWIRENISEWRNCTIVSPDAGGAKRVTSIADRLNVDFALIHKERKKANEVDRMVLVGDVKDRVAILVDDMADTCGTICHAADKLLSAGATRVYAILTHGIFSGPAISRINNACFEAVVVTNTIPQEDKMKHCSKIQVIDISMILAEAIRRTHNGESVSYLFSHVPL

SEQ ID NO: 13935 - DNA, 2457 bp, Homo sapiens
  ref <308>: DATABASE ACCESSION NUMBER: EMBL / Y00971
  ref <309>: DATABASE ENTRY DATE: 1993-09-12
cgctgttgcctccgccacctcctccgccgccgcgcgcccctcggagttccgcgccccaccatgcccaacatcgtgctgttcagcggcagctcgcatcaggacctatcccagcgcgtggccgaccgcctgggcctggagctgggcaaggtggtcacgaagaagttcagcaaccaggagaccagcgtggagattggtgaaagcgtgagaggggaagatgtctacatcatccagagcggctgcggggaaattaacgacaacctgatggaactcctcatcatgatcaatgcctgcaagattgcgtcatcatccagagtaactgccgtgatcccgtgtttcccatacgcccgacaagataaaaaggacaagagtcgtgccccaatttctgcaaaacttgtggccaatatgctgtcggtggctggggcggatcacatcatcaccatggacctgcatgcttctcagatacagggattctttgatattcctgtggataatttgtatgcggagcccgcagtcctgcagtggattcgggaaaacattgccgagtggaagaactgtatcattgtttcacctgacgcagggggagccaaaagggttacatcaattgcagacaggttgaatgtggaatttgctttgatccacaaagagaggaagaaggcgaatgaagtggaccggatggtcctggtgggcgacgtgaaggaccgtgtggccatcctcgtggatgacatggctgacacttgcggcaccatctgccatgctgcggacaagctgctgtcagctggagccaccaaagtgtatgctatccttacccatgggatcttctctggaccagctatttccagaataaataatgccgcctttgaggctgttgtcgtcacaaacacaattccgcaagaggacaaaatgaaacactgcaccaagattcaggtcattgacatttccatgatcttggccgaagcaatccgaaggacacacaatggggaatccgtgtcctacctgttcagccatgtcccgctataaatccagaatgggaagtgtccagcaagcctactctgacttctgacttgtttttgttttctggatttttagctgtaggtattcagcaatgataggttaatcactggcaaaagcatcagatctttgtatatgctaagatttattgtttccccttctaaagctcaagatcatttctttccagtttttggggaaatggtggtggttatttggtctttaagtgaactgtcttaaatgagaaacgtttttgtcattttgacttttaacaggtacaggtgatctcttcctttgttctttcagtactttgaggcgacaactttcaagtatataatttcattgtggaagtcatagtttatatatttcgaggttgccaaaggtgacttcacattaaagccttctgtgtaaatatatactgataatgcctatggacatttgggtaaaaccctgtatagaattaattatccttttactttggagtgaaccttggaaaatttataattataataccatggattttgaattttccttttttttttttttttttggataactcagtttcagataaaccatcttggttactgtgcttaatttggaccaaattttatttagcttaatatggacactgacacattttggggggtatacattagacatatcagagcagtgtatttctggatcattttttaaatgacctcttctaaaacataactgtcacttacctgaaatgctgcatcctaaaattccaaaattatattgagcaatcgccaaggcctaaagccaactgacttaaaggtaatcatttcagctaagattaaatttaaagcctaagaatgtatagagctagttttaaaataatgatctcagatttttaaaaaggatataggaacctgcattgtcattctctgaattaagaactgatggtttctatcattatttagccccacctttgtattttaaaatccttcagaatacatttatgaaccaatgcgactggacttagccacacacaatggaaattcagaccttgactatttggtgtttccagttcacaaaggtgatgaagactgtcttgggagcagcttaatcccaaaatttgtacatttcttgctgctcctggcgtggaaacttaagtgagaccaccaaatacattggtcctgtccaattctactgaatgggggtggacctggcatttatctggccaaaaacaggagccagagaaatatgaatataccaaagttgtttgtttagcctccaacttaaattacattagtcaacttatagatactcatatgatcacttttctttttagatactacatcaactagattcaggagtatatcatttgcagtgcttgtattggtttaaaatgtaagattttaagatcctctaacactgtactaaaacatttcaataaaatcattctgactgcgttcaaaaaaaaaaaaa

SEQ ID NO: 13936 - protein, 317 aa, Homo sapiens; identical to SEQ ID NO: 13934
  ref <308>: DATABASE ACCESSION NUMBER: SWISS-Prot / KIHUR1
  ref <309>: DATABASE ENTRY DATE: 2002-06-15

SEQ ID NO: 13937 - DNA, 2326 bp, Rattus norvegicus
  ref <308>: DATABASE ACCESSION NUMBER: EMBL / X53588
  ref <309>: DATABASE ENTRY DATE: 1993-09-12
ctcagccagacagtcctcacctgcaacaggtggcctcaggagtcaggaacatctctacttccccaacgacccctgggttgtcctctcagagatggctatggatactacaaggtgtggagcccagttgttgactctggtcgagcagatcctggcagagttccagctgcaggaggaagacctgaagaaggtgatgagccggatgcagaaggagatggaccgtggcctgaggctggagacccacgaggaggccagtgtaaagatgttacccacctacgtgcgttccaccccagaaggctcagaagtcggagactttctctccttagacctgggaggaaccaacttcagagtgatgctggtcaaagtgggagagggggaggcagggcagtggagcgtgaagacaaaacaccagatgtactccatccccgaggacgccatgacgggcactgccgagatgctctttgactacatctctgaatgcatctctgacttccttgacaagcatcagatgaagcacaagaaactgcccctgggcttcaccttctccttccctgtgaggcacgaagacctagacaagggcatcctcctcaattggaccaagggcttcaaggcctctggagcagaagggaacaacatcgtaggacttctccgagatgctatcaagaggagaggggactttgagatggatgtggtggcaatggtgaacgacacagtggccacaatgatctcctgctactatgaagaccgccaatgtgaggtcggcatgattgtgggcactggctgcaatgcctgctacatggaggaaatgcagaatgtggagctggtggaaggggatgagggacgcatgtgcgtcaacacggagtggggcgccttcggggactcgggcgagctggatgagttcctactggagtatgaccggatggtggatgaaagctcagcgaaccccggtcagcagctgtacgagaagatcatcggtgggaagtatatgggcgagctggtacgacttgtgctgcttaagctggtggacgagaaccttctgttccacggagaggcctcggagcagctgcgcacgcgtggtgcttttgagacccgtttcgtgtcacaagtggagagcgactccggggaccgaaagcagatccacaacatcctaagcactctggggcttcgaccctctgtcaccgactgcgacattgtgcgccgtgcctgtgaaagcgtgtccactcgcgccgcccatatgtgctccgcaggactagctggggtcataaatcgcatgcgcgaaagccgcagtgaggacgtgatgcgcatcactgtgggcgtggatggctccgtgtacaagctgcacccgagcttcaaggagcggtttcacgccagtgtgcgcaggctgacacccaactgcgaaatcaccttcatcgaatcagaggagggcagcggcaggggagccgcgctggtctctgcggtggcctgcaagaaggcttgcatgctggcccagtgaaatccaggtcatatggaccgggacctgggttccacggggactccacacaccacaaatgctcccagcccaccggggcaggagacctattctgctgctacccctggaaaatggggagaggcccctgcaagccgagtcggccagtgggacagccctagggctctcagcctggggcagggggctgggaggaagaagaggatcagaggcgccaaggcctttcttgctagaatcaactacagaaaatggcggaaaatactcaggacttgcactttcacgattcttgcttcccaagcgtgggtctggcctcccaagggaatgcttcctggaccttgcaatggcctggcttccctgggggggacacaccttcatggggaggtaacttcagcagttcggccagaccagaccccaggagagtaagggctgctagtcacccagacctggctgttttcttgtctgtggctgaagaggccggggagccatgagagactgactatccggctacatggagaggactttccaggcatgaacatgccagagactgttgccttcatatacctccacccgagtggcttacagttctgggatgaaccctcccaggagatgccagaggttagagccccagagtccttgctctaaggggaccagaaaggggaggcctcactctgcactattcaagcaggaatcatctccaacactcaggtccctgacccaggaggaagaagccaccctcagtgtccctccaagagaccacccaggtccttctctccctcgttcccaaatgccagcctctctacctgggactgtgggggagtttttaattaaatatttaaaactacttca

SEQ ID NO: 13938 - protein, 465 aa, Rattus norvegicus
  ref <308>: DATABASE ACCESSION NUMBER: SWISS-Prot / CAA37657
  ref <309>: DATABASE ENTRY DATE: 2002-06-15
MLDDRARMEATKKEKVEQILAEFQLQEEDLKKVMSRMQKEMDRGLRLETHEEASVKMLPTYVRSTPEGSEVGDFLSLDLGGTNFRVMLVKVGEGEAGQWSVKTKHQMYSIPEDAMTGTAEMLFDYISECISDFLDKHQMKHKKLPLGFTFSFPVRHEDLDKGILLNWTKGFKASGAEGNNIVGLLRDAIKRRGDFEMDVVAMVNDTVATMISCYYEDRQCEVGMIVGTGCNACYMEEMQNVELVEGDEGRMCVNTEWGAFGDSGELDEFLLEYDRMVDESSANPGQQLYEKIIGGKYMGELVRLVLLKLVDENLLFHGEASEQLRTRGAFETRFVSQVESDSGDRKQIHNILSTLGLRPSVTDCDIVRRACESVSTRAAHMCSAGLAGVINRMRESRSEDVMRITVGVDGSVYKLHPSFKERFHASVRRLTPNCEITFIESEEGSGRGAALVSAVACKKACMLAQ

SEQ ID NO: 13939 - DNA, 2550 bp, Homo sapiens
  ref <308>: DATABASE ACCESSION NUMBER: EMBL / M69051
  ref <309>: DATABASE ENTRY DATE: 1999-07-02
aagccctgggctgccagcctcaggcagctctccatccaagcagccgttgctgccacaggcgggccttacgctccaaggctacagcatgtgctaggcctcagcaggcaggagcatctctgcctcccaaagcatctacctcttagcccctcggagagatggcgatggatgtcacaaggagccaggcccagacagccttgactctgccagactctcctctgaactcgggcctcacatggccaactgctacttggaacaaatcgccccttggctggcagatgtgttaacatgcccagaccaagatcccaactcccacaacccaactcccaggtagagcagatcctggcagagttccagctgcaggaggaggacctgaagaaggtgatgagacggatgcagaaggagatggaccgcggcctgaggctggagacccatgaagaggccagtgtgaagatgctgcccacctacgtgcgctccaccccagaaggctcagaagtcggggacttcctctccctggacctgggtggcactaacttcagggtgatgctggtgaaggtgggagaaggtgaggaggggcagtggagcgtgaagaccaaacaccagacgtactccatccccgaggacgccatgaccggcactgctgagatgctcttcgactacatctctgagtgcatctccgacttcctggacaagcatcagatgaaacacaagaagctgcccctgggcttcaccttctcctttcctgtgaggcacgaagacatcgataagggcatccttctcaactggaccaagggcttcaaggcctcaggagcagaagggaacaatgtcgtggggcttctgcgagacgctatcaaacggagaggggactttgaaatggatgtggtggcaatggtgaatgacacggtggccacgatgatctcctgctactacgaagaccatcagtgcgaggtcggcatgatcgtgggcacgggctgcaatgcctgctacatggaggagatgcagaatgtggagctggtggagggggacgagggccgcatgtgcgtcaataccgagtggggcgccttcggggactccggcgagctggacgagttcctgctggagtatgaccgcctggtggacgagagctctgcaaaccccggtcagcagctgtatgagaagctcataggtggcaagtacatgggcgagctggtgcggcttgtgctgctcaggctcgtggacgaaaacctgctcttccacggggaggcctccgagcagctgcgcacacgcggagccttcgagacgcgcttcgtgtcgcaggtggagagcgacacgggcgaccgcaagcagatctacaacatcctgagcacgctggggctgcgaccctcgaccaccgactgcgacatcgtgcgccgcgcctgcgagagcgtgtctacgcgcgctgcgcacatgtgctcggcggggctggcgggcgtcatcaaccgcatgcgcgagagccgcagcgaggacgtaatgcgcatcactgtgggcgtggatggctccgtgtacaagctgcaccccagcttcaaggagcggttccatgccagcgtgcgcaggctgacgcccagctgcgagatcaccttcatcgagtcggaggagggcagtggccggggcgcggccctggtctcggcggtggcctgtaagaaggcctgtatgctgggccagtgagagcagtggccgcaagcgcagggaggatgccacagccccacagcacccaggctccatggggaagtgctccccacacgtgctcgcagcctggcggggcaggaggcctggccttgtcaggacccaggccgcctgccataccgctggggaacagagcgggcctcttccctcagtttttcggtgggacagccccagggccctaacgggggtgcggcaggagcaggaacagagactctggaagccccccacctttctcgctggaatcaatttcccagaagggagttgctcactcaggactttgatgcatttccacactgtcagagctgttggcctcgcctgggcccaggctctgggaaggggtgccctctggatcctgctgtggcctcacttccctgggaactcatcctgtgtggggaggcagctccaacagcttgaccagacctagacctgggccaaaagggcaggccaggggctgctcatcacccagtcctggccattttcttgcctgaggctcaagaggcccagggagcaatgggagggggctccatggaggaggtgtcccaagctttgaataccccccagagaccttttctctcccataccatcactgagtggcttgtgattctgggatggaccctcgcagcaggtgcaagagacagagcccccaagcctctgccccaaggggcccacaaaggggagaagggccagccctacatcttcagctcccatagcgctggctcaggaagaaaccccaagcagcattcagcacaccccaagggacaaccccatcatatgacatgccaccctctccatgcccaacctaagattgtgtgggttttttaattaaaaatgttaaaagttttaaaaaaaaaa

SEQ ID NO: 13940 - protein, 465 aa, Homo sapiens [sequence omitted]

SEQ ID NO: 13941 - DNA, 2431 bp, Rattus norvegicus
  ref <308>: DATABASE ACCESSION NUMBER: EMBL / X54400
  ref <309>: DATABASE ENTRY DATE: 1999-08-25
ggcatctcctgcagagggatcagcctgctcgaactgcaagcatgatgtgggggaccaaacttctgccggtcctgttgctgcagcatgtcctgctgcacctcctcctgcttcctgtcaccatcccctatgcagaaggacagaagaagagaagaaatactcttcatgaattcaaaaagtcagcaaaaactactcttaccaaggaagacccattagtgaagattaaaaccaaaaaagtgaactctgcagatgagtgtgccaacaggtgcatcagaaacaagggctttccattcacttgcaaggcctttgtttttgataagtcgagaaaacgatgctactggtatcctttcaatagtatgtcaagtggagtgaaaaaagggtttggccatgaatttgacctctatgaaaacaaagactatattagaaattgcatcattggtaaaggaggcagctataaggggacagtatccatcactaagagtggcatcaagtgccagccttggaattccatgatcccccatgaacacagctttttgccttcgagctatcgcggtaaagacctacaggaaaactactgtcgaaatcctcgaggggaagaagggggaccctggtgtttcacaagcaatccagaggtacgctacgaagtctgtgacattcctcagtgttcagaagttgaatgcatgacctgcaacggtgaaagctacagaggtcccatggatcacacagaatcaggcaagacatgtcagcgctgggatcagcagacaccacaccggcacaaattcttgccggaaagatatcccgacaagggctttgatgataattattgccgcaatcccgatggcaagccgaggccatggtgctacactcttgaccctgacaccccttgggagtattgtgcaattaaaatgtgcgctcacagtgctgtgaatgagactgatgttcccatggaaacaactgaatgtataaaaggccaaggagaaggttacaggggaaccaccaataccatttggaatggaattccgtgtcagcgttgggattcgcagtacccccacaagcatgacatcactcccgagaacttcaaatgcaaggaccttagagaaaattattgccgcaatccggatggggctgaatcaccatggtgttttaccactgatccaaacatccgagttggttactgctctcaaattcccaaatgtgacgtgtcaagtggacaagattgttatcgtggcaatgggaaaaactacatgggcaacttatccaaaacaaggtctggactcacatgttccatgtgggacaagaatatggaggatttacaccgtcatatcttctgggagccagacgctagcaagttgactaagaattactgccggaaccccgatgacgacgcccatggaccttggtgctacacagggaatcctctcgttccttgggattattgccctatttcccgttgtgaaggagatactacacctacaattgtcaatttggaccatcctgtaatatcctgtgccaaaacaaaacaactgcgagttgtaaatggcattccaacacaaacaacagtagggtggatggttagtttgaaatacaggaataaacacatctgtgggggatcattgataaaggaaagttgggttcttactgcaaggcaatgttttccagctagaaacaaagacttgaaagactatgaagcttggcttggaatccatgatgtccatgagagaggcgaggagaaacgcaaacagatcttaaacatttcccagctagtctatggacctgaaggctcagatttggttttactgaagcttgctcgccctgcaatcctggataactttgtcagtacaattgatttacctagttatggctgtacaatccctgaaaagactacttgcagtatttacggctggggctacactggattgatcaacgcagatggtttattacgagtagctcatctgtatattatggggaatgagaaatgcagtcagcaccatcaaggcaaggtgactttgaatgagtctgaattatgtgctggggctgaaaagattggatcaggaccttgtgagggagattatggtggcccactcatttgtgaacaacacaaaatgagaatggttcttggtgtcattgttcctggtcgtggatgtgccatcccaaatcgtcctggtatttttgttcgagtagcatattatgcaaaatggatacacaaagtaattttgacatacaagttgtaatagccatagaagaggccagtgtatttgaagcatccatggatacaggaagatttccaagacttcaggattaaaatgtcacctaaaacaatcctaaaacaactacttgagtgttgtgagtgttcagatactcattaatatatgtgggcgttttctgttgtattgtttgtcagtgtccttttgtaaatgttgaagtgagttagggt

SEQ ID NO: 13942 - protein, 728 aa, Rattus norvegicus
  ref <308>: DATABASE ACCESSION NUMBER: SWISS-Prot / CAA38266
  ref <309>: DATABASE ENTRY DATE: 2002-06-15
MMWGTKLLPVLLLQHVLLHLLLLPVTIPYAEGQKKRRNTLHEFKKSAKTTLTKEDPLVKIKTKKVNSADECANRCIRNKGFPFTCKAFVFDKSRKRCYWYPFNSMSSGVKKGFGHEFDLYENKDYIRNCIIGKGGSYKGTVSITKSGIKCQPWNSMIPHEHSFLPSSYRGKDLQENYCRNPRGEEGGPWCFTSNPEVRYEVCDIPQCSEVECMTCNGESYRGPMDHTESGKTCQRWDQQTPHRHKFLPERYPDKGFDDNYCRNPDGKPRPWCYTLDPDTPWEYCAIKMCAHSAVNETDVPMETTECIKGQGEGYRGTTNTIWNGIPCQRWDSQYPHKHDITPENFKCKDLRENYCRNPDGAESPWCFTTDPNIRVGYCSQIPKCDVSSGQDCYRGNGKNYMGNLSKTRSGLTCSMWDKNMEDLHRHIFWEPDASKLTKNYCRNPDDDAHGPWCYTGNPLVPWDYCPISRCEGDTTPTIVNLDHPVISCAKTKQLRVVNGIPTQTTVGWMVSLKYRNKHICGGSLIKESWVLTARQCFPARNKDLKDYEAWLGIHDVHERGEEKRKQILNISQLVYGPEGSDLVLLKLARPAILDNFVSTIDLPSYGCTIPEKTTCSIYGWGYTGLINADGLLRVAHLYIMGNEKCSQHHQGKVTLNESELCAGAEKIGSGPCEGDYGGPLICEQHKMRMVLGVIVPGRGCAIPNRPGIFVRVAYYAKWIHKVILTYKL

SEQ ID NO: 13943 - DNA, 4259 bp, Rattus norvegicus; identical to SEQ ID NO: 9609
  ref <308>: DATABASE ACCESSION NUMBER: EMBL / X55660
  ref <309>: DATABASE ENTRY DATE: 1993-09-12

SEQ ID NO: 13944 - protein, 793 aa, Rattus norvegicus; identical to SEQ ID NO: 9610
  ref <308>: DATABASE ACCESSION NUMBER: SWISS-Prot / CAA39193
  ref <309>: DATABASE ENTRY DATE: 2001-10-16

SEQ ID NO: 13945 - DNA, 4180 bp, Homo sapiens
  ref <308>: DATABASE ACCESSION NUMBER: Refseq / NM_002569
  ref <309>: DATABASE ENTRY DATE: 2002-11-05
gcggggaagcagcagcggccaggatgaatcccaggtgctctggagctggatggtgaaggtcggcactcttcaccctcccgagccctgcccgtctcggccccatgcccccaccagtcagccccgggccacaggcagtgagcaggcacctgggagccgaggccctgtgaccaggccaaggagacgggcgctccagggtcccagccacctgtcccccccatggagctgaggccctggttgctatgggtggtagcagcaacaggaaccttggtcctgctagcagctgatgctcagggccagaaggtcttcaccaacacgtgggctgtgcgcatccctggaggcccagcggtggccaacagtgtggcacggaagcatgggttcctcaacctgggccagatcttcggggactattaccacttctggcatcgaggagtgacgaagcggtccctgtcgcctcaccgcccgcggcacagccggctgcagagggagcctcaagtacagtggctggaacagcaggtggcaaagcgacggactaaacgggacgtgtaccaggagcccacagaccccaagtttcctcagcagtggtacctgtctggtgtcactcagcgggacctgaatgtgaaggcggcctgggcgcagggctacacagggcacggcattgtggtctccattctggacgatggcatcgagaagaaccacccggacttggcaggcaattatgatcctggggccagttttgatgtcaatgaccaggaccctgacccccagcctcggtacacacagatgaatgacaacaggcacggcacacggtgtgcgggggaagtggctgcggtggccaacaacggtgtctgtggtgtaggtgtggcctacaacgcccgcattggaggggtgcgcatgctggatggcgaggtgacagatgcagtggaggcacgctcgctgggcctgaaccccaaccacatccacatctacagtgccagctggggccccgaggatgacggcaagacagtggatgggccagcccgcctcgccgaggaggccttcttccgtggggttagccagggccgaggggggctgggctccatctttgtctgggcctcggggaacgggggccgggaacatgacagctgcaactgcgacggctacaccaacagtatctacacgctgtccatcagcagcgccacgcagtttggcaacgtgccgtggtacagcgaggcctgctcgtccacactggccacgacctacagcagtggcaaccagaatgagaagcagatcgtgacgactgacttgcggcagaagtgcacggagtctcacacgggcacctcagcctctgcccccttagcagccggcatcattgctctcaccctggaggccaataagaacctcacatggcgggacatgcaacacctggtggtacagacctcgaagccagcccacctcaatgccaacgactgggccaccaatggtgtgggccggaaagtgagccactcatatggctacgggcttttggacgcaggcgccatggtggccctggcccagaattggaccacagtggccccccagcggaagtgcatcatcgacatcctcaccgagcccaaagacatcgggaaacggctcgaggtgcggaagaccgtgaccgcgtgcctgggcgagcccaaccacatcactcggctggagcacgctcaggcgcggctcaccctgtcctataatcgccgtggcgacctggccatccacctggtcagccccatgggcacccgctccaccctgctggcagccaggccacatgactactccgcagatgggtttaatgactgggccttcatgacaactcattcctgggatgaggatccctctggcgagtgggtcctagagattgaaaacaccagcgaagccaacaactatgggacgctgaccaagttcaccctcgtactctatggcaccgcccctgaggggctgcccgtacctccagaaagcagtggctgcaagaccctcacgtccagtcaggcctgtgtggtgtgcgaggaaggcttctccctgcaccagaagagctgtgtccagcactgccctccagggttcgccccccaagtcctcgatacgcactatagcaccgagaatgacgtggagaccatccgggccagcgtctgcgccccctgccacgcctcatgtgccacatgccaggggccggccctgacagactgcctcagctgccccagccacgcctccttggaccctgtggagcagacttgctcccggcaaagccagagcagccgagagtccccgccacagcagcagccacctcggctgcccccggaggtggaggcggggcaacggctgcgggcagggctgctgccctcacacctgcctgaggtggtggccggcctcagctgcgccttcatcgtgctggtcttcgtcactgtcttcctggtcctgcagctgcgctctggctttagttttcggggggtgaaggtgtacaccatggaccgtggcctcatctcctacaaggggctgccccctgaagcctggcaggaggagtgcccgtctgactcagaagaggacgagggccggggcgagaggaccgcctttatcaaagaccagagcgccctctgatgagcccactgcccaccccctcaagccaatcccctccttgggcactttttaattcaccaaagtatttttttatcttgggactgggtttggaccccagctgggaggcaagaggggtggagactgcttcccatcctaccctcgggcccacctggccacctgaggtgggcccaggaccagctggggcgtggggagggccgtaccccaccctcagcaccccttccatgtggagaaaggagtgaaacctttagggcagcttgccccggccccggccccagccagagttcctgcggagtgaagaggggcagcccttgcttgttgggattcctgacccaggccgcagctcttgcccttccctgtccctctaaagcaataatggtcccatccaggcagtcgggggctggcctaggagatatctgagggaggaggccacctctccaagggcttctgcaccctccaccctgtcccccagctctggtgagtcttggcggcagcagccatcataggaagggaccaaggcaaggcaggtgcctccaggtgtgcacgtggcatgtggcctgtggcctgtgtcccatgacccacccctgtgctccgtgcctccaccaccactggccaccaggctggcgcagccaaggccgaagctctggctgaaccctgtgctggtgtcctgaccaccctcccctctcttgcacccgcctctcccgtcagggcccaagtccctgttttctgagcccgggctgcctgggctgttggcactcacagacctggagcccctgggtgggtggtggggaggggcgctggcccagccggcctctctggcctcccacccgatgctgctttcccctgtggggatctcaggggctgtttgaggatatattttcactttgtgattatttcactttagatgctgatgatttgtttttgtatttttaatgggggtagcagctggactacccacgttctcacacccaccgtccgccctgctcctccctggctgccctggccctgaggtgtgggggctgcagcatgttgctgaggagtgaggaatagttgagccccaagtcctgaagaggcgggccagccaggcgggctcaaggaaagggggtcccagtgggaggggcaggctgacatctgtgtttcaagtggggctcgccatgccgggggttcataggtcactggctctccaagtgccagaggtgggcaggtggtggcactgagcccccccaacactgtgccctggtggagaaagcactgacctgtcatgcccccctcaaacctcctcttctgacgtgccttttgcacccctcccattaggacaatcagtcccctcccatctgggagtccccttttcttttctaccctagccattcctggtacccagccatctgcccaggggtgccccctcctctcccatccccctgccctcgtggccagcccggctggttttgtaagatgctgggttggtgcacagtgatttttttcttgtaatttaaacaggcccagcattgctggttctatttaatggacatgagataatgttagaggttttaaagtgattaaacgtgcagactatgcaaaccag

SEQ ID NO: 13946 - protein, 794 aa, Homo sapiens; identical to SEQ ID NO: 9612
  ref <308>: DATABASE ACCESSION NUMBER: Refseq / NP_002560
  ref <309>: DATABASE ENTRY DATE: 2002-11-05

SEQ ID NO: 13947 - DNA, 4259 bp, Rattus norvegicus; identical to SEQ ID NO: 9609
  ref <308>: DATABASE ACCESSION NUMBER: EMBL / X55660
  ref <309>: DATABASE ENTRY DATE: 1993-09-12

SEQ ID NO: 13948 - protein, 793 aa, Rattus norvegicus; identical to SEQ ID NO: 9610
  ref <308>: DATABASE ACCESSION NUMBER: SWISS-Prot / CAA39193
  ref <309>: DATABASE ENTRY DATE: 2001-10-16

SEQ ID NO: 13949 - DNA, 4180 bp, Homo sapiens; identical to SEQ ID NO: 13945
  ref <308>: DATABASE ACCESSION NUMBER: Refseq / NM_002569
  ref <309>: DATABASE ENTRY DATE: 2002-11-05

SEQ ID NO: 13950 - protein, 794 aa, Homo sapiens; identical to SEQ ID NO: 9612
  ref <308>: DATABASE ACCESSION NUMBER: Refseq / NP_002560
  ref <309>: DATABASE ENTRY DATE: 2002-11-05

SEQ ID NO: 13951 - DNA, 6114 bp, Rattus norvegicus
  ref <308>: DATABASE ACCESSION NUMBER: EMBL / X56747
  ref <309>: DATABASE ENTRY DATE: 1995-07-20
agcactcttcctgagtactgtcctcctgggtctttcatgccagggctctgactgggaatccgacagaaattttatttcagccgctggtcctctaacaaatgacttagtgcttaatctgaactatccaccgggaaagcagggctctgatgtggtatccggtaacaccgaccatctactctgccagcagccactgccctctttcttgtctcagtatttcagcagtcttcgtgccagccaggttacccattacaaagttcttctgtcatgggcacaacttctcccaactggaagctccaagaatccagaccaggaagcagtgcagtgctaccgacaactcctccagtccctgaaggatgcccagcttgagcccatggtggtcctgtgccatcagacgccacccaccagcagcgccatccagagagaaggggcctttgctgacctctttgctgactatgccacattggcttttcagtcctttggggaccttgttgagatctggttcaccttcagtgacttggagaaagtgatcatggatcttccccacaaagatctgaaagcttctgctcttcaaaccctcagcaatgcccacaggagagcctttgagatttaccacagaaagttctcatctcaggggggaaagctgtctgtggtcctgaaggctgaagatattccagagcttctgccagacccggcattggctgctctcgtccagggctcggtggatttcctctctcttgatttgtcttacgaatgccaaagtgtggcgactctaccacagaagctgagtgaattgcagaaccttgagccaaaagtgaaagttttcatctacaccctaaaacttgaggactgcccagcgaccgggacgagcccctcctcactgctcatcagcctcctggaagccataaataaagaccaaatccaaactgttggctttgatgttaatgcattcctgagctgtacgtccaattctgaggagagcccatcttgttctttaaccgacagcctggcccttcagactgagcagcagcaggagacagctgtaccctcatcccctggatcagcctaccagagagtttgggcagcctttgctaaccagtctagggaggaaagggatgctttcctacaagatgtgtttccagaagggttcctctggggcatatccacgggagcctttaatgtggagggaggctgggcagaaggcggcagagggccgagcatctgggatcactacggtaacctgaatgctgccgagggacaagccacagcaaaagtggccagtgacagttaccacaaaccagcttctgatgtcgccctcctccgaggcatcagggctcaggtgtacaagttctccatctcctggtccggcctcttcccactagggcagaagagcacccccaaccgccaaggtgtcgcctactacaacaaactgatcgaccgcctgctggactcacacatcgagcccatggctacactgttccactgggacctgcctcaggccctgcaggagcaaggcggctggcaaaacgagagtgtggtggaggccttcctggactacgcagccttctgcttctccactttcggggaccgtgtgaaactgtgggtgaccttccacgagccatgggtgatgagctatgcaggctatggtactggacagcacgcaccagccatctctgacccaggaatggcttcctttaaggtggctcacctgatcctcaaggcacatgccagaacttggcatctctacgaccttcaccatcgcctacagcagcaggggcgcgtgggcatcgtcctcaattcagacttagcggagcccctggataggaagagtcctcaggaccttgctgctgctgagcgcttcctacacttcatgctgggctggttcgcacaccccatctttgtagatggggactaccccactacttcggcccagatccagcacataaaccagcagtgtggccatcctctggcccaactcccagagttcactgaagcggagaagcggctccttaagggctctgcggatttcctgggtctgtctcattacacctcccgcctcatcagcaaggctgggcggcagacctgcacctccagctacgataacatcggaggcttctcccagcatgtggaccccgagtggccccagactgcatctccctggatccgagtggtgccctggggcataaggaggctgcttcggttcgcgtctatggagtacacgaaaggaaaacttccaatcttcttggctgggaatggcatgccagtaggggaagaagcggacctctttgacgactcagtgagagtaaactacttcaactggtacatcaacgaggtgctcaaggctgtcaaggaggatttggtggatgtccgttcatacattgttcgttccctcattgacggctatgaaggacccctgggcttcagtcagaggtttgggctataccatgtcaacttcaatgacagcagcaggccacgaactcccaggaaatctgcatacctcttcaccagcatcattgaaaagaatggtttttcagccaagaaagtcaaaagaaacccactgcccgtgagagcagacttcacctccagagccagggtcaccgacagccttccatcagaggtgccctccaaggctaaaatcagtgtggagaagttctccaagcagcccaggtttgaaagagacttgttctatgacgggagattccgggatgacttcctgtggggtgtatcctcttcaccctatcagatcgaaggaggatggaatgctgatggcaaagggcccagcatctgggataacttcacccacaccccagggaatggtgtgaaagacaatgccaccggagacgtagcgtgcgacagctatcaccaactggacgccgacctaaacatccttcgaaccctgaaggtcaagtcctatcgattttccatctcctggtctcgaattttcccaacaggaagaaacagtaccatcaacaaacaaggcgttgattattacaacagactgattgacagcttggtggacaacaacatcttccccatggtgacactgtttcactgggacctgccccaggccctccaggatattggaggttgggagaacccttctttgattgagttgtttgacagctatgcagactactgctttaagacctttggtgacagagtcaagttctggatgacctttaacgagccctggtgtcacgtggtgttaggctacagttcagggatatttcccccaagtgttcaggagccaggctggctaccttataaggttagccatatcgtcattaaggcacatgctagggtctaccatacttacgatgagaagtaccgctcggagcagaaaggtgtcatctctctcagcctcaacactcactgggcagaacccaaggacccagggctccaaagggatgtggaagccgctgaccggatgctgcagtttaccatgggctggtttgcccacccgatttttaaaaacggggactatccagacgtcatgaaatggactgtggggaacaggagtgagctgcagcacctggccagctcccgcctgcctaccttcacagaggaagagaagaattacgtcagaggcaccgctgatgtcttttgccacaacacctacacgtctgtgtttgtgcagcacagcactcccaggctgaacccacccagctatgatgatgacatggagttgaagctaatcgaaatgaactcgtcgacgggtgtgatgcaccaagacgtgccctgggggacgaggagactgctgaactggatcaaggaggagtatggcaacattcctatttatatcactgaaaatggacagggactggaaaaccccacactggatgacacagaaaggatcttctaccacaaaacctatatcaacgaggctctgaaagcctacaagctggatggtgtggaccttcgagggtactctgcctggacgctgatggacgacttcgagtggctgcttggctacaccatgagatttggattgtattacgttgactttaatcatgtgagcagacctcgcacagcaagagcctcagccagatactatccagacctcattgccaacaatggcatgcccctggccagggaagatgagttcctgtatggagagtttcctaagggcttcatctggagtgcggcttctgcttcataccaggttgaaggcgcgtggagagcagatggcaaaggactcagtatctgggacacattttcccacacaccactgaggatcgggaatgatgacaacggagacgtggcatgtgacagttaccacaagattgccgaggatgtggtggcccttcagaacctgggcgtgtcccactatcgcttctccattgcctggtctagaatcctcccagacggaaccaccaagttcatcaatgaagcgggcctcagttactatgttcgattcattgatgccctgctggctgctggcatcacaccacaggtgaccatttatcactgggacctgccccaggcactgcaagacgtggggggctgggagaacgagacaattgtgcagcggtttaaggagtacgcggatgtgctcttccagaggctgggggacagagtcaagttctggatcactctgaacgagcccttcgtcattgcagcccaaggctacggcactggggtgtctgctccaggaatctccttcaggcctggcacagctccgtacattgctggacacaacctaataaaggcccacgctgaggcctggcatctctacaacgatgtataccgcgcccgccagggaggcaccatctccatcacgatcagcagtgactggggtgaacccagggatcccaccaacagggagcacgtggaggcagccaggagctacgtacagtttatggggggctggtttgcacaccccatcttcaaaaacggagattacccggaggtgatgaagacacggatccgcgacagaagccttggcgcaggcctcaacaagtccaggctccctgagtttacggagagtgagaagagtaggatcaagggcacctttgactttttcgggttcaaccacaacaccactgtcctagcttacaacctcgactacccggctgccttctcctcctttgatgcagacaggggcgttgcttccattgcagacagctcttggccagtctctggctccttctggctgaaggtgaccccttttggcttccggaggatcttgaactggctgaaggaggagtacaataatcctccgatttatgtcaccgagaatggtgtctccagacgaggagagccggaactcaacgacaccgacaggatctactacctgcgcagctacatcaacgaagccctcaaggctgtacacgacaaggtggaccttcgaggctacacggtatggagcatcatggacaactttgaatgggccacaggcttcgcagagaggttcggtgtgcactttgtgaaccgctctgacccatctttgccaaggatccccagggcatcagccaagttctatgccaccatcgtccgctgcaatggctttcccgaccctgcacaaggacctcatccttgtctccagcaaccagaagacgctgcacccactgccagtcccgtgcagtcggaagtgcccttcctggggctgatgctgggcatcgcagaagcacagacagcgctgtacgtgctcttcgctctgctgctgcttggagcctgcagcctggcatttctgacctacaatactggccggcgctccaagcaagggaacgcgcagccaagccagcaccagctgagtccaatttcctccttctgaaagttgtacagagtggcctgatttctttaagaagccatgctagcaccagacccctccctgcctgcagcaagcgtcttcctcgttcctcgtggctttgcgcactgttcgaggtaatttctgttggtatcaggaattgcccctagcagtgacaccttttggctactgttggcatgcaatggccaaacattcccagaagaccttttggatcaattcgcacctccacctgggaataagaggcagattccctgccccctaggtctgtttttctcttctttctgtcacccctttcctttgtctccttcccccattaaaatctccccacgtggaaaaaaaaaaaaaaaaaa

SEQ ID NO: 13952 - protein, 1928 aa, Rattus norvegicus
  ref <308>: DATABASE ACCESSION NUMBER: SWISS-Prot / CAA40069
  ref <309>: DATABASE ENTRY DATE: 2001-10-16
MELPWTALFLSTVLLGLSCQGSDWESDRNFISAAGPLTNDLVLNLNYPPGKQGSDVVSGNTDHLLCQQPLPSFLSQYFSSLRASQVTHYKVLLSWAQLLPTGSSKNPDQEAVQCYRQLLQSLKDAQLEPMVVLCHQTPPTSSAIQREGAFADLFADYATLAFQSFGDLVEIWFTFSDLEKVIMDLPHKDLKASALQTLSNAHRRAFEIYHRKFSSQGGKLSVVLKAEDIPELLPDPALAALVQGSVDFLSLDLSYECQSVATLPQKLSELQNLEPKVKVFIYTLKLEDCPATGTSPSSLLISLLEAINKDQIQTVGFDVNAFLSCTSNSEESPSCSLTDSLALQTEQQQETAVPSSPGSAYQRVWAAFANQSREERDAFLQDVFPEGFLWGISTGAFNVEGGWAEGGRGPSIWDHYGNLNAAEGQATAKVASDSYHKPASDVALLRGIRAQVYKFSISWSGLFPLGQKSTPNRQGVAYYNKLIDRLLDSHIEPMATLFHWDLPQALQEQGGWQNESVVEAFLDYAAFCFSTFGDRVKLWVTFHEPWVMSYAGYGTGQHAPAISDPGMASFKVAHLILKAHARTWHLYDLHHRLQQQGRVGIVLNSDLAEPLDRKSPQDLAAAERFLHFMLGWFAHPIFVDGDYPTTSAQIQHINQQCGHPLAQLPEFTEAEKRLLKGSADFLGLSHYTSRLISKAGRQTCTSSYDNIGGFSQHVDPEWPQTASPWIRVVPWGIRRLLRFASMEYTKGKLPIFLAGNGMPVGEEADLFDDSVRVNYFNWYINEVLKAVKEDLVDVRSYIVRSLIDGYEGPLGFSQRFGLYHVNFNDSSRPRTPRKSAYLFTSIIEKNGFSAKKVKRNPLPVRADFTSRARVTDSLPSEVPSKAKISVEKFSKQPRFERDLFYDGRFRDDFLWGVSSSPYQIEGGWNADGKGPSIWDNFTHTPGNGVKDNATGDVACDSYHQLDADLNILRTLKVKSYRFSISWSRIFPTGRNSTINKQGVDYYNRLIDSLVDNNIFPMVTLFHWDLPQALQDIGGWENPSLIELFDSYADYCFKTFGDRVKFWMTFNEPWCHVVLGYSSGIFPPSVQEPGWLPYKVSHIVIKAHARVYHTYDEKYRSEQKGVISLSLNTHWAEPKDPGLQRDVEAADRMLQFTMGWFAHPIFKNGDYPDVMKWTVGNRSELQHLASSRLPTFTEEEKNYVRGTADVFCHNTYTSVFVQHSTPRLNPPSYDDDMELKLIEMNSSTGVMHQDVPWGTRRLLNWIKEEYGNIPIYITENGQGLENPTLDDTERIFYHKTYINEALKAYKLDGVDLRGYSAWTLMDDFEWLLGYTMRFGLYYVDFNHVSRPRTARASARYYPDLIANNGMPLAREDEFLYGEFPKGFIWSAASASYQVEGAWRADGKGLSIWDTFSHTPLRIGNDDNGDVACDSYHKIAEDVVALQNLGVSHYRFSIAWSRILPDGTTKFINEAGLSYYVRFIDALLAAGITPQVTIYHWDLPQALQDVGGWENETIVQRFKEYADVLFQRLGDRVKFWITLNEPFVIAAQGYGTGVSAPGISFRPGTAPYIAGHNLIKAHAEAWHLYNDVYRARQGGTISITISSDWGEPRDPTNREHVEAARSYVQFMGGWFAHPIFKNGDYPEVMKTRIRDRSLGAGLNKSRLPEFTESEKSRIKGTFDFFGFNHNTTVLAYNLDYPAAFSSFDADRGVASIADSSWPVSGSFWLKVTPFGFRRILNWLKEEYNNPPIYVTENGVSRRGEPELNDTDRIYYLRSYINEALKAVHDKVDLRGYTVWSIMDNFEWATGFAERFGVHFVNRSDPSLPRIPRASAKFYATIVRCNGFPDPAQGPHPCLQQPEDAAPTASPVQSEVPFLGLMLGIAEAQTALYVLFALLLLGACSLAFLTYNTGRRSKQGNAQPSQHQLSPISSF

SEQ ID NO: 13953 - DNA, 6274 bp, Homo sapiens
  ref <308>: DATABASE ACCESSION NUMBER: Refseq / NM_002299
  ref <309>: DATABASE ENTRY DATE: 2002-11-05
gttcctagaaaatggagctgtcttggcatgtagtctttattgccctgctaagtttttcatgctgggggtcagactgggagtctgatagaaatttcatttccaccgctggtcctctaaccaatgacttgctgcacaacctgagtggtctcctgggagaccagagttctaactttgtagcaggggacaaagacatgtatgtttgtcaccagccactgcccactttcctgccagaatacttcagcagtctccatgccagtcagatcacccattataaggtatttctgtcatgggcacagctcctcccagcaggaagcacccagaatccagacgagaaaacagtgcagtgctaccggcgactcctcaaggccctcaagactgcacggcttcagcccatggtcatcctgcaccaccagaccctccctgccagcaccctccggagaaccgaagcctttgctgacctcttcgccgactatgccacattcgccttccactccttcggggacctagttgggatctggttcaccttcagtgacttggaggaagtgatcaaggagcttccccaccaggaatcaagagcgtcacaactccagaccctcagtgatgcccacagaaaagcctatgagatttaccacgaaagctatgcttttcagggcggaaaactctctgttgtcctgcgagctgaagatatcccggagctcctgctagaaccacccatatctgcgcttgcccaggacacggtcgatttcctctctcttgatttgtcttatgaatgccaaaatgaggcaagtctgcggcagaagctgagtaaattgcagaccattgagccaaaagtgaaagttttcatcttcaacctaaaactcccagactgcccctccaccatgaagaacccagccagtctgctcttcagcctttttgaagccataaataaagaccaagtgctcaccattgggtttgatattaatgagtttctgagttgttcatcaagttccaagaaaagcatgtcttgttctctgactggcagcctggcccttcagcctgaccagcagcaggaccacgagaccacggactcctctcctgcctctgcctatcagagagtctgggaagcatttgccaatcagtccagagcggaaagggatgccttcctgcaggatactttccctgaaggcttcctctggggtgcctccacaggagcctttaacgtggaaggaggctgggccgagggtgggagaggggtgagcatctgggatccacgcaggcccctgaacaccactgagggccaagcgacgctggaggtggccagcgacagttaccacaaggtagcctctgacgtcgccctgctttgcggcctccgggctcaggtgtacaagttctccatctcctggtcccggatcttccccatggggcacgggagcagccccagcctcccaggcgttgcctactacaacaagctgattgacaggctacaggatgcgggcatcgagcccatggccacgctgttccactgggacctgcctcaggccctgcaggatcatggtggatggcagaatgagagcgtggtggatgccttcctggactatgcggccttctgcttctccacatttggggaccgtgtgaagctgtgggtgaccttccatgagccgtgggtgatgagctacgcaggctatggcaccggccagcaccctcccggcatctctgacccaggagtggcctcttttaaggtggctcacttggtcctcaaggctcatgccagaacttggcaccactacaacagccatcatcgcccacagcagcaggggcacgtgggcattgtgctgaactcagactgggcagaacccctgtctccagagaggcctgaggacctgagagcctctgagcgcttcttgcacttcatgctgggctggtttgcacaccccgtctttgtggatggagactacccagccaccctgaggacccagatccaacagatgaacagacagtgctcccatcctgtggctcaactccccgagttcacagaggcagagaagcagctcctgaaaggctctgctgattttctgggtctgtcgcattacacctcccgcctcatcagcaacgccccacaaaacacctgcatccctagctatgataccattggaggcttctcccaacacgtgaaccatgtgtggccccagacctcatcctcttggattcgtgtggtgccctgggggataaggaggctgttgcagtttgtatccctggaatacacaagaggaaaagttccaatataccttgccgggaatggcatgcccataggggaaagtgaaaatctctttgatgattccttaagagtagactacttcaatcaatatatcaatgaggtgctcaaggctatcaaggaagactctgtggatgttcgttcctacattgctcgttccctcattgatggcttcgaaggcccttctggttacagccagcggtttggcctgcaccacgtcaacttcagcgacagcagcaagtcaaggactcccaggaaatctgcctactttttcactagcatcatagaaaagaacggtttcctcaccaagggggcaaaaagactgctaccacctaatacagtaaacctcccctccaaagtcagagccttcacttttccatctgaggtgccctccaaggctaaagtcgtttgggaaaagttctccagccaacccaagttcgaaagagatttgttctaccacgggacgtttcgggatgactttctgtggggcgtgtcctcttccgcttatcagattgaaggcgcgtgggatgccgatggcaaaggccccagcatctgggataactttacccacacaccagggagcaatgtgaaagacaatgccactggagacatcgcctgtgacagctatcaccagctggatgccgatctgaatatgctccgagctttgaaggtgaaggcctaccgcttctctatctcctggtctcggattttcccaactgggagaaacagctctatcaacagtcatggggttgattattacaacaggctgatcaatggcttggtggcaagcaacatctttcccatggtgacattgttccattgggacctgccccaggccctccaggatatcggaggctgggagaatcctgccttgattgacttgtttgacagctacgcagacttttgtttccagacctttggtgatagagtcaagttttggatgacttttaatgagcccatgtacctggcatggctaggttatggctcaggggaatttcccccaggggtgaaggacccaggctgggcaccatataggatagcccacaccgtcatcaaagcccatgccagagtctatcacacgtacgatgagaaatacaggcaggagcagaagggggtcatctcgctgagcctcagtacacactgggcagagcccaagtcaccaggggtccccagagatgtggaagccgctgaccgaatgctgcagttctccctgggctggtttgctcaccccatttttagaaacggagactatcctgacaccatgaagtggaaagtggggaacaggagtgaactgcagcacttagccacctcccgcctgccaagcttcactgaggaagagaagaggttcatcagggcgacggccgacgtcttctgcctcaacacgtactactccagaatcgtgcagcacaaaacacccaggctaaacccaccctcctacgaagacgaccaggagatggctgaggaggaggacccttcgtggccttccacggcaatgaacagagctgcgccctgggggacgcgaaggctgctgaactggatcaaggaagagtatggtgacatccccatttacatcaccgaaaacggagtggggctgaccaatccgaacacggaggatactgataggatattttaccacaaaacctacatcaatgaggctttgaaagcctacaggctcgatggtatagaccttcgagggtatgtcgcctggtctctgatggacaactttgagtggctaaatggctacacggtcaagtttggactgtaccatgttgatttcaacaacacgaacaggcctcgcacagcaagagcctccgccaggtactacacagaggtcattaccaacaacggcatgccactggccagggaggatgagtttctgtacggacggtttcctgagggcttcatctggagtgcagcttctgctgcatatcagattgaaggtgcgtggagagcagatggcaaaggactcagcatttgggacacgttttctcacacaccactgagggttgagaacgatgccattggagacgtggcctgtgacagttatcacaagattgctgaggatctggtcaccctgcagaacctgggtgtgtcccactaccgtttttccatctcctggtctcgcatcctccctgatggaaccaccaggtacatcaatgaagcgggcctgaactactacgtgaggctcatcgatacactgctggccgccagcatccagccccaggtgaccatttaccactgggacctaccacagacgctccaagatgtaggaggctgggagaatgagaccatcgtgcagcggtttaaggagtatgcagatgtgctcttccagaggctgggagacaaggtgaagttttggatcacgttgaatgagccctttgtcattgcttaccagggctatggctacggaacagcagctccaggagtctccaataggcctggcactgccccctacattgttggccacaatctaataaaggctcatgctgaggcctggcatctgtacaacgatgtgtaccgcgccagtcaaggtggcgtgatttccatcaccatcagcagtgactgggctgaacccagagatccctctaaccaggaggatgtggaggcagccaggagatatgttcagttcatgggaggctggtttgcacatcctattttcaagaatggagattacaatgaggtgatgaagacgcggatccgtgacaggagcttggctgcaggcctcaacaagtctcggctgccagaatttacagagagtgagaagaggaggatcaacggcacctatgacttttttgggttcaatcactacaccactgtcctcgcctacaacctcaactatgccactgccatctcttcttttgatgcagacagaggagttgcttccatcgcagatcgctcgtggccagactctggctccttctggctgaagatgacgccttttggcttcaggaggatcctgaactggttaaaggaggaatacaatgaccctccaatttatgtcacagagaatggagtgtcccagcgggaagaaacagacctcaatgacactgcaaggatctactaccttcggacttacatcaatgaggccctcaaagctgtgcaggacaaggtggaccttcgaggatacacagtttggagtgcgatggacaattttgagtgggccacaggcttttcagagagatttggtctgcattttgtgaactacagtgacccttctctgccaaggatccccaaagcatcagcgaagttctacgcctctgtggtccgatgcaatggcttccctgaccccgctacagggcctcacgcttgtctccaccagccagatgctggacccaccatcagccccgtgagacaggaggaggtgcagttcctggggctaatgctcggcaccacagaagcacagacagctttgtacgttctcttttctcttgtgcttcttggagtctgtggcttggcatttctgtcatacaagtactgcaagcgctctaagcaagggaaaacacaacgaagccaacaggaattgagcccggtgtcttcattctgatgagttaccacctcaagttctatgaagcaggcctagtttcttcatctatctttaccggccaccaaacaccttagggtcttagactctgctgatactggacttctccataaagtcctgctgcaccgttagagatgactttaatcttgaatgatttcgacttgctgagtaaaatggaaatatctccatcttgctccagtatcagagttcatttgggcatttgagaagcaagtagctcttgcggaaacgtgtagatactggtctagtgggtctgtgaaccacttaattgaacttaacagggctgttttaagtttcagagttgttaagggttgttaagggagcaaaaaccgtaaaaatccttcctataagaagaaatcaactccattgcatagactgcaatatcatctcctgcccttctgcaagctctccctagcttcacatcttgtgttttccagaaaataaaaacagaagactgtcctttc

SEQ ID NO: 13954 - protein, 1927 aa, Homo sapiens [sequence omitted]

SEQ ID NO: 13955 - DNA, 2674 bp, Rattus norvegicus; identical to SEQ ID NO: 9660
  misc_feature (1)..(2674): n=a, c, g or t
  ref <308>: DATABASE ACCESSION NUMBER: EMBL / X57523
  ref <309>: DATABASE ENTRY DATE: 1992-06-25

SEQ ID NO: 13956 - protein, 725 aa, Rattus norvegicus; identical to SEQ ID NO: 9661
  ref <308>: DATABASE ACCESSION NUMBER: SWISS-Prot / CAA40742
  ref <309>: DATABASE ENTRY DATE: 2002-06-15

SEQ ID NO: 13957 - DNA, 2247 bp, Homo sapiens
  ref <308>: DATABASE ACCESSION NUMBER: EMBL / L21205
  ref <309>: DATABASE ENTRY DATE: 2000-03-04
atggctagctctaggtgtcccgctccccgcgggtgccgctgcctccccggagcttctctcgcatggctggggacagtactgctacttctcgccgactgggtgctgctccggaccgcgctgccccgcatattctccctgctggtgcccaccgcgctgccactgctccgggtctgggcggtgggcctgagccgctgggccgtgctctggctgggggcctgcggggtcctcagggcaacggttggctccaagagcgaaaacgcaggtgcccagggctggctggctgctttgaagccattagctgcggcactgggcttggccctgccgggacttgccttgttccgagagctgatctcatggggagcccccgggtccgcggatagcaccaggctactgcactggggaagtcaccctaccgccttcgttgtcagttatgcagcggcactgcccgcagcagccctgtggcacaaactcgggagcctctgggtgcccggcggtcagggcggctctggaaaccctgtgcgtcggcttctaggctgcctgggctcggagacgcgccgcctctcgctgttcctggtcctggtggtcctctcctctcttggggagatggccattccattctttacgggccgcctcactgactggattctacaagatggctcagccgataccttcactcgaaacttaactctcatgtccattctcaccatagccagtgcagtgctggagttcgtgggtgacgggatctataacaacaccatgggccacgtgcacagccacttgcagggagaggtgtttggggctgtcctgcgccaggagacggagtttttccaacagaaccagacaggtaacatcatgtctcgggtaacagaggacacgtccaccctgagtgattctctgagtgagaatctgagcttatttctgtggtacctggtgcgaggcctatgtctcttggggatcatgctctggggatcagtgtccctcaccatggtcaccctggtcaccctgcctctgcttttccttctgcccaagaaggtgggaaaatggtaccagttgctggaagtgcaggtgcgggaatctctggcaaagtccagccaggtggccattgaggctctgtcggccatgcctacagttcgaagctttgccaacgaggagggcgaagcccagaagtttagggaaaagctgcaagaaataaagacactcaaccagaaggaggctgtggcctatgcagtcaactcctggaccactagtatttcaggtatgctgctgaaagtgggaatcctctacattggtgggcagctggtgaccagtggggctgtaagcagtgggaaccttgtcacatttgttctctaccagatgcagttcacccaggctgtggaggtactgctctccatctaccccagagtacagaaggctgtgggctcctcagagaaaatatttgagtacctggaccgcacccctcgctgcccacccagtggtctgttgactcccttacacttggagggccttgtccagttccaagatgtctcctttgcctacccaaaccgcccagatgtcttagtgctacaggggctgacattcaccctacgccctggcgaggtgacggcgctggtgggacccaatgggtctgggaagagcacagtggctgccctgctgcagaatctgtaccagcccaccgggggacagctgctgttggatgggaagccccttccccaatatgagcaccgctacctgcacaggcaggtggctgcagtgggacaagagccacaggtatttggaagaagtcttcaagaaaatattgcctatggcctgacccagaagccaactatggaggaaatcacagctgctgcagtaaagtctggggcccatagtttcatctctggactccctcagggctatgacacagaggtaggcgaggctgggagccagctgtcagggggtcagcgacaggcagtggcgttggcccgagcattgatccggaaaccatgtgtacttatcctggatgatgccaccagtgccctggatgcaaacagccagttacaggtggagcagctcctgtacgaaagccctgagcggtactcccgctcagtgcttctcatcacccagcacctcagcctggtggagcaggctgaccacatcctctttctggaaggaggcgctatccgggaggggggaacccaccagcagctcatggagaaaaaggggtgctactgggccatggtgcaggctcctgcagatgctccagaatga

SEQ ID NO: 13958 - protein, 748 aa, Homo sapiens; identical to SEQ ID NO: 9861
  ref <308>: DATABASE ACCESSION NUMBER: SWISS-Prot / AAC12903
  ref <309>: DATABASE ENTRY DATE: 2002-06-15

SEQ ID NO: 13959 - DNA, 2674 bp, Rattus norvegicus; identical to SEQ ID NO: 9660
  misc_feature (1)..(2674): n=a, c, g or t
  ref <308>: DATABASE ACCESSION NUMBER: EMBL / X57523
  ref <309>: DATABASE ENTRY DATE: 1992-06-25

SEQ ID NO: 13960 - protein, 725 aa, Rattus norvegicus; identical to SEQ ID NO: 9661
  ref <308>: DATABASE ACCESSION NUMBER: SWISS-Prot / CAA40742
  ref <309>: DATABASE ENTRY DATE: 2002-06-15

SEQ ID NO: 13961 - DNA, 2958 bp, Homo sapiens
  ref <308>: DATABASE ACCESSION NUMBER: Refseq / NM_000593
  ref <309>: DATABASE ENTRY DATE: 2002-11-08
ggcacgagggtgtgcgtgatggagaaaattgggcaccagggctgctcccgagattctcagatctgatttccacgcttgctaccaaaatagtctgggcaggccacttttggaagtaggcgttatctagtgagcaggcggccgctttcgatttcgctttcccctaaatggctgagcttctcgccagcgcaggatcagcctgttcctgggactttccgagagccccgccctcgttccctcccccagccgccagtaggggaggactcggcggtacccggagcttcaggccccaccggggcgcggagagtcccagacccggccgggaccgggacggcgtccgagtgccaatggctagctctaggtgtcccgctccccgcgggtgccgctgcctccccggagcttctctcgcatggctggggacagtactgctacttctcgccgactgggtgctgctccggaccgcgctgccccgcatattctccctgctggtgcccaccgcgctgccactgctccgggtctgggcggtgggcctgagccgctgggccgtgctctggctgggggcctgcggggtcctcagggcaacggttggctccaagagcgaaaacgcaggtgcccagggctggctggctgctttgaagccattagctgcggcactgggcttggccctgccgggacttgccttgttccgagagctgatctcatggggagcccccgggtccgcggatagcaccaggctactgcactggggaagtcaccctaccgccttcgttgtcagttatgcagcggcactgcccgcagcagccctgtggcacaaactcgggagcctctgggtgcccggcggtcagggcggctctggaaaccctgtgcgtcggcttctaggctgcctgggctcggagacgcgccgcctctcgctgttcctggtcctggtggtcctctcctctcttggggagatggccattccattctttacgggccgcctcactgactggattctacaagatggctcagccgataccttcactcgaaacttaactctcatgtccattctcaccatagccagtgcagtgctggagttcgtgggtgacgggatctataacaacaccatgggccacgtgcacagccacttgcagggagaggtgtttggggctgtcctgcgccaggagacggagtttttccaacagaaccagacaggtaacatcatgtctcgggtaacagaggacacgtccaccctgagtgattctctgagtgagaatctgagcttatttctgtggtacctggtgcgaggcctatgtctcttggggatcatgctctggggatcagtgtccctcaccatggtcaccctgatcaccctgcctctgcttttccttctgcccaagaaggtgggaaaatggtaccagttgctggaagtgcaggtgcgggaatctctggcaaagtccagccaggtggccattgaggctctgtcggccatgcctacagttcgaagctttgccaacgaggagggcgaagcccagaagtttagggaaaagctgcaagaaataaagacactcaaccagaaggaggctgtggcctatgcagtcaactcctggaccactagtatttcaggtatgctgctgaaagtgggaatcctctacattggtgggcagctggtgaccagtggggctgtaagcagtgggaaccttgtcacatttgttctctaccagatgcagttcacccaggctgtggaggtactgctctccatctaccccagagtacagaaggctgtgggctcctcagagaaaatatttgagtacctggaccgcacccctcgctgcccacccagtggtctgttgactcccttacacttggagggccttgtccagttccaagatgtctcctttgcctacccaaaccgcccagatgtcttagtgctacaggggctgacattcaccctacgccctggcgaggtgacggcgctggtgggacccaatgggtctgggaagagcacagtggctgccctgctgcagaatctgtaccagcccaccgggggacagctgctgttggatgggaagccccttccccaatatgagcaccgctacctgcacaggcaggtggctgcagtgggacaagagccacaggtatttggaagaagtcttcaagaaaatattgcctatggcctgacccagaagccaactatggaggaaatcacagctgctgcagtaaagtctggggcccatagtttcatctctggactccctcagggctatgacacagaggtagacgaggctgggagccagctgtcagggggtcagcgacaggcagtggcgttggcccgagcattgatccggaaaccgtgtgtacttatcctggatgatgccaccagtgccctggatgcaaacagccagttacaggtggagcagctcctgtacgaaagccctgagcggtactcccgctcagtgcttctcatcacccagcacctcagcctggtggagcaggctgaccacatcctctttctggaaggaggcgctatccgggaggggggaacccaccagcagctcatggagaaaaaggggtgctactgggccatggtgcaggctcctgcagatgctccagaatgaaagccttctcagacctgcgcactccatctccctcccttttcttctctctgtggtggagaaccacagctgcagagtagcagctgcctccaggatgagttacttgaaatttgccttgagtgtgttacctcctttccaagctcctcgtgataatgcagacttcctggagtacaaacacaggatttgtaattcctactgtaacggagtttagagccagggctgatgctttggtgtggccagcactctgaaactgagaaatgttcagaatgtacggaaagatgatcagctattttcaacataactgaaggcatatgctggcccataaacaccctgtaggttcttgatatttataataaaattggtgttttgt

SEQ ID NO: 13962 - protein, 808 aa, Homo sapiens
  ref <308>: DATABASE ACCESSION NUMBER: Refseq / NP_000584
  ref <309>: DATABASE ENTRY DATE: 2002-11-08
MAELLASAGSACSWDFPRAPPSFPPPAASRGGLGGTRSFRPHRGAESPRPGRDRDGVRVPMASSRCPAPRGCRCLPGASLAWLGTVLLLLADWVLLRTALPRIFSLLVPTALPLLRVWAVGLSRWAVLWLGACGVLRATVGSKSENAGAQGWLAALKPLAAALGLALPGLALFRELISWGAPGSADSTRLLHWGSHPTAFVVSYAAALPAAALWHKLGSLWVPGGQGGSGNPVRRLLGCLGSETRRLSLFLVLVVLSSLGEMAIPFFTGRLTDWILQDGSADTFTRNLTLMSILTIASAVLEFVGDGIYNNTMGHVHSHLQGEVFGAVLRQETEFFQQNQTGNIMSRVTEDTSTLSDSLSENLSLFLWYLVRGLCLLGIMLWGSVSLTMVTLITLPLLFLLPKKVGKWYQLLEVQVRESLAKSSQVAIEALSAMPTVRSFANEEGEAQKFREKLQEIKTLNQKEAVAYAVNSWTTSISGMLLKVGILYIGGQLVTSGAVSSGNLVTFVLYQMQFTQAVEVLLSIYPRVQKAVGSSEKIFEYLDRTPRCPPSGLLTPLHLEGLVQFQDVSFAYPNRPDVLVLQGLTFTLRPGEVTALVGPNGSGKSTVAALLQNLYQPTGGQLLLDGKPLPQYEHRYLHRQVAAVGQEPQVFGRSLQENIAYGLTQKPTMEEITAAAVKSGAHSFISGLPQGYDTEVDEAGSQLSGGQRQAVALARALIRKPCVLILDDATSALDANSQLQVEQLLYESPERYSRSVLLITQHLSLVEQADHILFLEGGAIREGGTHQQLMEKKGCYWAMVQAPADAPE

SEQ ID NO: 13963 - DNA, 1594 bp, Rattus norvegicus
  ref <308>: DATABASE ACCESSION NUMBER: EMBL / X59249
  ref <309>: DATABASE ENTRY DATE: 1991-08-02
gaattctccggactgttgctaccttctaacttctgggcagatgtctgtcaagagctaggtccactggcccatacacatcctgctgaagaagcaacagaagtttccagctgaagcttctctgagacagcatgaaagccaacaataccacgacgagtgccttgtggttgcaaatcacctacatcaccatggaggctgccattggtctctgtgctgtagtgggcaacatgctggtcatctgggtggtcaagctgaaccgcactctgaggaccaccaccttctatttcatcgtctccctagcactggctgacattgctgttggggtgctggtcatacccttggccattgcgtcagcctggaggtccagatgcacttctatggcctgccttttcatgtcctgtgtgcttctggtcttcacccacgcttccatcatgtccttgctggccattgctgtagaccgatacctgcgagtcaagctgacagtcagatatagaacggttaccactcaaagaagaatatggctattcctgggcctctgctggctagtgtcctttctggtgggactgacccccatgtttggctggaatagaaaagtgaccttagagctctctcaaaacagctccaccctctcatgccacttccgttccgtggtcggcttggattacatggtcttcttcagcttcatcacctggatcctcatccccctggttgtcatgtgcatcatctatctggacatcttctacatcatccgaaacaaactcagtcaaaatctgactggcttcagagagacgcgtgcattttacggtcgggagttcaagaccgctaagtccctgtttctggttctcttcttgtttgccttgtgctggctgcctttgtccatcatcaattttgtttcctactttaatgtgaagataccagagattgcaatgtgcctgggcatcctgttgtcccatgcgaactccatgatgaaccctattgtctacgcctgcaaaataaaaaagttcaaagaaacctactttgtgatcctcagagcttgcaggctctgtcagacctcggattctttggactcaaaccttgaacagactactgagtagttaccatgacagataaagagccagctcatttaccttcacagttcgcatcggtaaacactataaggacttaacagccattcttgcttacttccactgcagtgggatcatcgggctggttgccacagagctcccttccctcctccctccgctcctccctccactcctccctccagtcttccctccactcctccctcccgcttcatttattttcttgagcttctctcattcaattctgtggaggtctgacatgaaggcaatgcattcctggttaccacagacttcgcccttccttcccagacacaagaagtaatggagtgaacgttgagggagtctcctctcaccaaagaagactctagtggggctggatgtacagaacctgcgttgaaggatccctaggatgttgggaacacagggagtgaattgaatttaaagagggctaaattcacctgtgtgggtgcatttgagcaaataaaagatggcgcccaaaaaaaaaaccggaattc

SEQ ID NO: 13964 - protein, 320 aa, Rattus norvegicus
  ref <308>: DATABASE ACCESSION NUMBER: SWISS-Prot / CAA41937
  ref <309>: DATABASE ENTRY DATE: 2000-05-30
MKANNTTTSALWLQITYITMEAAIGLCAVVGNMLVIWVVKLNRTLRTTTFYFIVSLALADIAVGVLVIPLAIAVSLEVQMHFYACLFMSCVLLVFTHASIMSLLAIAVDRYLRVKLTVRYRTVTTQRRIWLFLGLCWLVSFLVGLTPMFGWNRKVTLELSQNSSTLSCHFRSVVGLDYMVFFSFITWILIPLVVMCIIYLDIFYIIRNKLSQNLTGFRETRAFYGREFKTAKSLFLVLFLFALCWLPLSIINFVSYFNVKIPEIAMCLGILLSHANSMMNPIVYACKIKKFKETYFVILRACRLCQTSDSLDSNLEQTTE

SEQ ID NO: 13965 - DNA, 1767 bp, Homo sapiens
  ref <308>: DATABASE ACCESSION NUMBER: EMBL / L20463
  ref <309>: DATABASE ENTRY DATE: 1999-06-30
tccttctgattcagtccatatagagctgtcctacagcattctggaaacttgaggatgtgcggtgcataaaggggctggaagtgacccacctgtgatgagccctttctaaggagaagggtttccaagagatcaccccaccagaaaagggtaggaatgagcaagttgggaattttagactgtcactgcacatggacctctgggaagacgtctggcgagagctaggcccactggccctacagacggatcttgctggctcacctgtccctgtggaggttcccctgggaaggcaagatgcccaacaacagcactactctgtcattggccaatgttacctacatcaccatggaaattttcattggactctgcgccatagtgggcaacgtgctggtcatctgcgtggtcaagctgaaccccagcctgcagaccaccaccttctatttcattgtctctctagccctggctgacattgctgttggggtgctggtcatgcctttggccattgttgtcagcctgggcatcacaatccacttctacagctgcctttttatgacttgcctactgcttatctttacccacgcctccatcatgtccttgctggccatcgctgtggaccgatacttgcgggtcaagcttaccgtcagatacaagagggtcaccactcacagaagaatatggctggccctgggcctttgctggctggtgtcattcctggtgggattgacccccatgtttggctggaacatgaaactgacctcagagtaccacagaaatgtcaccttcctttcatgccaatttgtttccgtcatgagaatggactacatggtatacttcagcttcctcacctggattttcatccccctggttgtcatgtgcgccatctatcttgacatcttttacatcattcggaacaaactcagtctgaacttatctaactccaaagagacaggtgcattttatggacgggagttcaagacggctaagtccttgtttctggttcttttcttgtttgctctgtcatggctgcctttatctatcatcaactgcatcatctactttaatggtgaggtaccacagcttgtgctgtacatgggcatcctgctgtcccatgccaactccatgatgaaccctatcgtctatgcctataaaataaagaagttcaaggaaacctaccttttgatcctcaaagcctgtgtggtctgccatccctctgattctttggacacaagcattgagaagaattctgagtagttatccatcagagatgactctgtctcattgaccttcagattccccatcaacaaacacttgagggcctgtatgcctgggccaagggatttttacatccttgattacttccactgaggtgggagcatctccagtgctccccaattatatctcccccactccactactctcttcctccacttcatttttcctttgtcctttctctctaattcagtgttttggaggcctgacttggggacaacgtattattgatattattgtctgttttccttcttcccaatagaagaataagtcatggagcctgaagggtgcctagttgacttactgacaaaaggctctagttgggctgaacatgtgtgtggtggtgactcatttccatgccattgtggaattgagcagagaacctgctctcggaggatgcctagaagatgttgggaacagaagaaataaactgagtttaagggggacttaaactgctgaattcacctgtggatgtttttgagtaaataaaagctaatagcg

SEQ ID NO: 13966 - protein, 318 aa, Homo sapiens
  ref <308>: DATABASE ACCESSION NUMBER: SWISS-Prot / AAA16365
  ref <309>: DATABASE ENTRY DATE: 2001-10-16
MPNNSTALSLANVTYITMEIFIGLCAIVGNVLVICVVKLNPSLQTTTFYFIVSLALADIAVGVLVMPLAIVVSLGITIHFYSCLFMTCLLLIFTHASIMSLLAIAVDRYLRVKLTVRYKRVTTHRRIWLALGLCWLVSFLVGLTPMFGWNMKLTSEYHRNVTFLSCQFVSVMRMDYMVYFSFLTWIFIPLVVMCAIYLDIFYIIRNKLSLNLSNSKETGAFYGREFKTAKSLFLVLFLFALSWLPLSIINCIIYFNGEVPQLVLYMGILLSHANSMMNPIVYAYKIKKFKETYLLILKACVVCHPSDSLDTSIEKNSE

SEQ ID NO: 13967 - DNA, 1632 bp, Rattus norvegicus
  ref <308>: DATABASE ACCESSION NUMBER: EMBL / X61296
  ref <309>: DATABASE ENTRY DATE: 1997-01-29
gaattaacattgatggagaaaccaagatattccatgacaaaaccaaatttacacaatatctttctacaaatccagcactacaaaggataataaatggtaaagcccaacataaggaggcaagctataccctagaggaagcaagaaactaatcgtcttggcaacaaaacaaagagaatgaaagcacacaaacataacctcacatccaaatatgaatataaagggagcaataatcactattccttaatatctctcaatatcaatggcctcaactccccaataaaaagacatagattaacaaactggatacgcaatgaggaccctgcattctgctgcctacaggaaacacacctcagagacaaagacagacattacctcagagtgaaaggctggaaaacaactttccaagcaaatggtcagaagaagcaagctggagtagccattctaatatcaaataaaatcaatttccaactaaaagtcatcaaaaaagataaggaaggacacttcatattcatcaaaggaaaaatccaccaagatgaactctcaatcctaaatatctatgccccaaatacaagggcacctacatacgtaaaagaaaccttactaaagctcaaaacacacattgcacctcacacaataatagtgggagacttcaacaccccactctcatcaatggacagatcatggaaacagaaattaaacagtgatgtcgacagactaagagaagtcatgagccaaatggacttaacggatatttatagaacattctatcctaaagcaaaaggatataccttcttctcagctcctcatggtactttctccaaaattgaccatataattggtcaaaaaacgggcctcaacaggtacagaaagatagagataatcccatgcatgctatcggaccaccacggcctaaaactggtcttcaataacaataagggaagaatgcccacatatacgtggaaattgaacaatgctctactcaatgataacctggtcaaggaagaaataaagaaagaaaataaaaagtttttagaatttaatgaaaatgaagatacaacatacccaaacttatgggacacaatgaaagctgtgctaagaggaaaactcatagcgctgagtgcctgcagaaagaaacaggaaagagcatatgtcagcagcttgacagcacacctaaaagctctagaacaaaaagaatcaaatacgcccaggaggagtagaaggcaggaaataatcaaactcagagctgaaatcaaccaagtagaaacaaaaaggaccatagaaagaatcaacagaaccaaaagttggttctttgagaaaatcaacaagatagataaacccttagccagactaacgagaggacacagagagtgcgtccaaattaacaaaatgagaaatgaaaagggagacataactacagattcagaggaaattcaaaaaatcatcagatcttactataaaaacctatattcaacaaaatctgaaaatcttcaggaaatggacaatttcctagacagataccaggtatcgaggttaaatcaggaacagataaaccagttaaacaaccccataactcctaaggaaatagcagcagtcactaaaggtctcccaaccaaaaagagcccaggtccagac

SEQ ID NO: 13968 - DNA, 3190 bp, Rattus norvegicus
  ref <308>: DATABASE ACCESSION NUMBER: EMBL / X63995
  ref <309>: DATABASE ENTRY DATE: 1992-07-29
ggcgcgagggccgccgctccgcagcccgggacccgccgccgcgccgcccgcagagctttccgtcttgtccccataacccgagaggagattcaaaccaagaaccaagagctagcctgggtcctcggcagatgggaatccgcatcacttactgaccagcagcatggagaccacacccttgaattctcagaaagtgctgtcagagtgtaaggacagagaggactgtcaagaaaatggtgttctacagaagggtgtccccaccacagcggacagggcagagcctagccaaatatccaatgggtactctgcagtccccagcacaagtgcaggggacgaagcttcacactcgatcccagctgccaccaccaccctggtggctgagattcgccaaggggagcgggagacctggggcaagaagatggatttcctcctgtccgtcattggctatgccgtggacctgggcaacatctggcggtttccttacatatgctaccagaatggcggaggggccttcctcctcccttataccatcatggccattttcggggggatcccgctcttttacatggagctcgcactgggccagtaccaccgaaacgggtgcatttccatatggaggaagatctgcccgattttcaaaggcattggttacgccatctgcatcatcgccttttacatcgcctcctactacaacaccatcatagcctgggcgctctactacctcatctcctccctcacggaccggctgccctggactagctgcacgaactcctggaacactggcaactgcaccaactacttcgcccaggacaacatcacctggacgctgcattccacgtcccccgctgaggagttctacttgcgccatgtcctgcagatccaccagtctaagggactccaggacctgggcaccatcagctggcagctgactctctgcatcgtgctcatcttcaccgtaatctactttagcatctggaaaggcgtcaaaacatctggcaaggtggtgtgggtgacagccaccttcccatacattgtcctctctgtcctgctggtgaggggggccacccttcctggagcctggagaggggtcgtcttctacttgaaacccaactggcagaaactcttggagacaggggtgtgggtagatgccgccgctcagatcttcttctctcttggcccgggctttggggttctcctggcttttgctagctacaacaagttcaacaacaactgttaccaagatgccctggtgaccagtgtggtgaactgcatgacaagcttcgtctctggcttcgtcatcttcacggtgcttggctacatggcggagatgaggaatgaagatgtgtcagaggtggccaaagacgcaggccccagcctcctcttcatcacgtatgcagaggcaatagccaacatgccagcatccacgttctttgccatcatcttcttcctcatgttaatcacgctgggattggacagcacgttcgcaggcctggaaggtgtgatcacagctgtgctggatgagttccctcacatctgggccaagcgcagggaatggttcgtgctcatcgtggtcatcacgtgcgtcttgggatccctgctcacactgacgtcaggaggggcatacgtggtgactctgctggaggagtatgccacggggccagcagtgctcaccgtggccctcatcgaggccgtcgccgtgtcttggttctatggaatcactcagttctgcagcgatgtgaaggagatgctgggcttcagcccgggatggttttggaggatctgctgggtggccatcagccctctgtttctcctgttcatcatttgcagttttctgatgagcccaccccagctacggcttttccaatacaactatccccactggagtatcgtcttgggctactgcatagggatgtcgtccgtcatctgcatccctacctatatcatttatcggctgatcagcactccggggacacttaaggagcgcattattaaaagtatcactcctgaaacacccacagaaatcccgtgtggggacatccgcatgaatgctgtgtaacacaccctgggagaggacacctcttcccagccacctctctcagctctgaaaagccccactggactcctcccctctaagccaagcctgatgaagacacggtcctaaccactatggtgcccagactcttgtggattccgaccacttctttccgtggactctcagacatgctaccacattcgatggtgactccactgagctggcctcttggacacgtcagggagtggaaggagggatgaacgccacccagtcatcagctagcttcaggtttagaattaggtctgtgagagtctgtatcatgtttttggtaagatcatactaccccgcatctgttagcttctaaagccttcaatgttcatgaatacataaaccacctaagagaaaacagagatgtcttgctagccatatatattttctcggtagcataggaattctatagctggaatctcctagaaccctgtaacccacgtgctgctgtgaggttaaggagggaaggtgtaaggattgctacactgaaaaaatggtgtatatgtgtgagctattgtgtctgtccattatcgtctgtgagccctcgatcccaatactccaggtccatttcaaactgtataaatggcctctaatttttcttacattaaacagattctacctactcaattgggttcgtgttattagaagccatacagtgttaacctctccttttccacagtctcctccaccacccacctccctgttaagcattcaggagaaaggtccatgggcaaacctggcctattctatcagtcaccatggccgctgctttccagatggttgtggcccaatgccacttccccagtcagctgggtacccccagtgtaagctctatttctaaagttctgggactccacactggactttactctttaaccattttttccaggctggagagatggctcagcagttaagagcactgactgctcttccagaggtcctgagttcaattcccagcaaccacacatggtggctaacaaccatctgtaatgagatctgatgccctcttctggtgtatatgaagtcagggacagtgtacccacatacatgaaataaatctttaaagaaaaaataggtttaaaaaaataaaaaaaccagaaaccaaaaaaaaaa

SEQ ID NO: 13969 - protein, 630 aa, Rattus norvegicus
  ref <308>: DATABASE ACCESSION NUMBER: PIR / S30604
  ref <309>: DATABASE ENTRY DATE: 1999-08-20
METTPLNSQKVLSECKDREDCQENGVLQKGVPTTADRAEPSQISNGYSAVPSTSAGDEASHSIPAATTTLVAEIRQGERETWGKKMDFLLSVIGYAVDLGNIWRFPYICYQNGGGAFLLPYTIMAIFGGIPLFYMELALGQYHRNGCISIWRKICPIFKGIGYAICIIAFYIASYYNTIIAWALYYLISSLTDRLPWTSCTNSWNTGNCTNYFAQDNITWTLHSTSPAEEFYLRHVLQIHQSKGLQDLGTISWQLTLCIVLIFTVIYFSIWKGVKTSGKVVWVTATFPYIVLSVLLVRGATLPGAWRGVVFYLKPNWQKLLETGVWVDAAAQIFFSLGPGFGVLLAFASYNKFNNNCYQDALVTSVVNCMTSFVSGFVIFTVLGYMAEMRNEDVSEVAKDAGPSLLFITYAEAIANMPASTFFAIIFFLMLITLGLDSTFAGLEGVITAVLDEFPHIWAKRREWFVLIVVITCVLGSLLTLTSGGAYVVTLLEEYATGPAVLTVALIEAVAVSWFYGITQFCSDVKEMLGFSPGWFWRICWVAISPLFLLFIICSFLMSPPQLRLFQYNYPHWSIVLGYCIGMSSVICIPTYIIYRLISTPGTLKERIIKSITPETPTEIPCGDIRMNAV

SEQ ID NO: 13970 - DNA, 2508 bp, Homo sapiens
  ref <308>: DATABASE ACCESSION NUMBER: EMBL / L05568
  ref <309>: DATABASE ENTRY DATE: 2000-03-04
caaatccaagcacccagagatcaattgggatccttggcagatggacatcagtgtcatttactaaccagcaggatggagacgacgcccttgaattctcagaagcagctatcagcgtgtgaagatggagaagattgtcaggaaaacggagttctacagaaggttgttcccaccccaggggacaaagtggagtccgggcaaatatccaatgggtactcagcagttccaagtcctggtgcgggagatgacacacggcactctatcccagcgaccaccaccaccctagtggctgagcttcatcaaggggaacgggagacctggggcaagaaggtggatttccttctctcagtgattggctatgctgtggacctgggcaatgtctggcgcttcccctacatatgttaccagaatggagggggggcattcctcctcccctacaccatcatggccatttttgggggaatcccgctcttttacatggagctcgcactgggacagtaccaccgaaatggatgcatttcaatatggaggaaaatctgcccgattttcaaagggattggttatgccatctgcatcattgccttttacattgcttcctactacaacaccatcatggcctgggcgctatactacctcatctcctccttcacggaccagctgccctggaccagctgcaagaactcctggaacactggcaactgcaccaattacttctccgaggacaacatcacctggaccctccattccacgtcccctgctgaagaattttacacgcgccacgtcctgcagatccaccggtctaaggggctccaggacctggggggcatcagctggcagctggccctctgcatcatgctgatcttcactgttatctacttcagcatctggaaaggcgtcaagacctctggcaaggtggtgtgggtgacagccaccttcccttatatcatcctttctgtcctgctggtgaggggtgccaccctccctggagcctggaggggtgttctcttctacttgaaacccaattggcagaaactcctggagacaggggtgtggatagatgcagccgctcagatcttcttctctcttggtccgggctttggggtcctgctggcttttgctagctacaacaagttcaacaacaactgctaccaagatgccctggtgaccagcgtggtgaactgcatgacgagcttcgtttcgggatttgtcatcttcacagtgctcggttacatggctgagatgaggaatgaagatgtgtctgaggtggccaaagacgcaggtcccagcctcctcttcatcacgtatgcagaagcgatagccaacatgccagcgtccactttctttgccatcatcttctttctgatgttaatcacgctgggcttggacagcacgtttgcaggcttggagggggtgatcacggctgtgctggatgagttcccacacgtctgggccaagcgccgggagcggttcgtgctcgccgtggtcatcacctgcttctttggatccctggtcaccctgacttttggaggggcctacgtggtgaagctgctggaggagtatgccacggggcccgcagtgctcactgtcgcgctgatcgaagcagtcgctgtgtcttggttctatggcatcactcagttctgcagggacgtgaaggaaatgctcggcttcagcccggggtggttctggaggatctgctgggtggccatcagccctctgtttctcctgttcatcatttgcagttttctgatgagcccgccacaactacgacttttccaatataattatccttactggagtatcatcttgggttactgcataggaacctcatctttcatttgcatccccacatatatagcttatcggttgatcatcactccagggacatttaaagagcgtattattaaaagtattaccccagaaacaccaacagaaattccttgtggggacatccgcttgaatgctgtgtaacacactcaccgagaggaaaaaggcttctccacaacctcctcctccagttctgatgaggcacgcctgccttctcccctccaagtgaatgagtttccagctaagcctgatgatggaagggccttctccacagggacacagtctggtgcccagactcaaggcctccagccacttatttccatggattcccctggacatattcccatggtagactgtgacacagctgagctggcctattttggacgtgtgaggatgtggatggaggtgatgaaaaccaccctatcatcagttaggattaggtttagaatcaagtctgtgaaagtctcctgtatcatttcttggtatgatcattggtatctgatatctgtttgcttctaaaggtttcactgttcatgaatacgtaaactgcgtaggagagaacagggatgctatctcgctagccatatattttctgagtagcatatagaattttattgctggaatctactagaaccttctaatccatgtgctgctgtggcatcaggaaaggaagatgtaagaagctaa

SEQ ID NO: 13971 - protein, 630 aa, Homo sapiens
  ref <308>: DATABASE ACCESSION NUMBER: PIR / A47398
  ref <309>: DATABASE ENTRY DATE: 1999-08-20
METTPLNSQKQLSACEDGEDCQENGVLQKVVPTPGDKVESGQISNGYSAVPSPGAGDDTRHSIPATTTTLVAELHQGERETWGKKVDFLLSVIGYAVDLGNVWRFPYICYQNGGGAFLLPYTIMAIFGGIPLFYMELALGQYHRNGCISIWRKICPIFKGIGYAICIIAFYIASYYNTIMAWALYYLISSFTDQLPWTSCKNSWNTGNCTNYFSEDNITWTLHSTSPAEEFYTRHVLQIHRSKGLQDLGGISWQLALCIMLIFTVIYFSIWKGVKTSGKVVWVTATFPYIILSVLLVRGATLPGAWRGVLFYLKPNWQKLLETGVWIDAAAQIFFSLGPGFGVLLAFASYNKFNNNCYQDALVTSVVNCMTSFVSGFVIFTVLGYMAEMRNEDVSEVAKDAGPSLLFITYAEAIANMPASTFFAIIFFLMLITLGLDSTFAGLEGVITAVLDEFPHVWAKRRERFVLAVVITCFFGSLVTLTFGGAYVVKLLEEYATGPAVLTVALIEAVAVSWFYGITQFCRDVKEMLGFSPGWFWRICWVAISPLFLLFIICSFLMSPPQLRLFQYNYPYWSIILGYCIGTSSFICIPTYIAYRLIITPGTFKERIIKSITPETPTEIPCGDIRLNAV

SEQ ID NO: 13972 - DNA, 2021 bp, Rattus norvegicus
  ref <308>: DATABASE ACCESSION NUMBER: EMBL / X66842
  ref <309>: DATABASE ENTRY DATE: 1992-08-20
ctgaaatctaagcctctagaaggactagaatctggatgtcttacctgcaaacatggacagatatgtacacagtcccatcttggagaacctgaatctttttagaagaaagaaggccaccttggctgggagtgtctggaggataccatgctttgcaaaagcagatgacctgctagcaactgaccatgctgaccactgtctggaactggactgagtcacagaaaggcgaatggcttcatcttataaaatgtctgaacaaagcacaatttctgagcacattttgcagaaaacatgtgatcacctgatcttgactgaccgttctggattaaaggcagaatcagcagcagaggaaatgaagcagactgccgagaaccaggggaatacagtgcactgggcagctctcctgatcttcgcggtaataatccccaccattggcgggaacatcctggttattctggctgtttcactggagaaaaggctgcagtacgctaccaactactttctaatgtccttggcggtggctgatttgctggttggattgtttgtgatgccgattgctctcttaacaatcatgtttgaggctacatggcccctcccactggccctgtgtcctgcctggttattccttgatgttctcttttcaactgcctccatcatgcatctctgtgccatttccctggatcgctatatagccatcaaaaagccaattcaggccaatcagtgcaattcccggactactgcattcgtcaagattacggtggtatggttaatttcaataggcatcgccatcccagtccctattaaaggaatagaggctgatgtggtcaacgcacacaacatcacctgtgagctgacaaaggaccgctttggcagtttcatgctctttgggtcactggctgctttctttgcacctctcaccatcatgatagtcacctactttctcaccattcacgctttgcggaagaaagcttacttggtcagaaacaggccacctcaacgcctaacacggtggactgtgtccacagttctccaaagggaagactcatccttttcatcaccagaaaagatggtgatgctggatggctctcacaaggataaaattctacctaactcaactgatgagacactgatgagaagaatgtcctcagcaggaaaaaaaccagcccagaccatttctaatgaacagagagcctcaaaggtccttggaattgtgtttctcttctttctgcttatgtggtgcccctttttcattacaaacgtaactttagctctgtgtgattcctgcaaccagactactctcaaaacactcctgcagatatttgtgtgggtaggctacgtttcctcgggagtgaatcctttgatctataccctcttcaataagacatttcgggaagcatttggcaggtacatcacctgcaattaccaggccacaaagtcagtaaaagtgcttagaaagtgttctagtacactctattttgggaattcaatggtagaaaactctaaatttttcacaaaacatggaattcgaaatgggatcaaccctgccatgtaccagagcccagtaaggctccgaagttcaaccattcagtcttcatccatcattctcctcaatacatttctcactgaaaacgatggtgacaaagtagaagaccaagtcagctacatatagtggaatggggcagccctcatctgactgagggaggggatgaggaggacgcaagcaaaccaaggaaaaggcaagagtgaagcactaaggttgtccagtttccttatctaaacaaactcaacgcacgggtatagtagttccgtatggctacaaacaaaagcattccctactctggtattcaaatggaacaaaattaaataagtggatatacttcagtctttaaaaagaaaagaaggggttggggatttagctcagtggtagagagtttgcctagtaagtgcaaggccctgggttcggttctcagctccagaaaaaaaaaaaataaaaaaaaaaaataaataaaaaaaaaaaaaaaaaa

SEQ ID NO: 13973 - protein, 479 aa, Rattus norvegicus
  ref <308>: DATABASE ACCESSION NUMBER: SWISS-Prot / P30994
  ref <309>: DATABASE ENTRY DATE: 1995-11-01
MASSYKMSEQSTISEHILQKTCDHLILTDRSGLKAESAAEEMKQTAENQGNTVHWAALLIFAVIIPTIGGNILVILAVSLEKRLQYATNYFLMSLAVADLLVGLFVMPIALLTIMFEATWPLPLALCPAWLFLDVLFSTASIMHLCAISLDRYIAIKKPIQANQCNSRTTAFVKITVVWLISIGIAIPVPIKGIEADVVNAHNITCELTKDRFGSFMLFGSLAAFFAPLTIMIVTYFLTIHALRKKAYLVRNRPPQRLTRWTVSTVLQREDSSFSSPEKMVMLDGSHKDKILPNSTDETLMRRMSSAGKKPAQTISNEQRASKVLGIVFLFFLLMWCPFFITNVTLALCDSCNQTTLKTLLQIFVWVGYVSSGVNPLIYTLFNKTFREAFGRYITCNYQATKSVKVLRKCSSTLYFGNSMVENSKFFTKHGIRNGINPAMYQSPVRLRSSTIQSSSIILLNTFLTENDGDKVEDQVSYI

SEQ ID NO: 13974 - DNA, 1790 bp, Homo sapiens
  ref <308>: DATABASE ACCESSION NUMBER: EMBL / X77307
  ref <309>: DATABASE ENTRY DATE: 1994-05-02
tactaaccatgctgaccactgttcggaacgggattgaatcacagaaaaacagcaaatggctctctcttacagagtgtctgaacttcaaagcacaattcctgagcacattttgcagagcacctttgttcacgttatctcttctaactggtctggattacagacagaatcaataccagaggaaatgaaacagattgttgaggaacagggaaataaactgcactgggcagctcttctgatactcatggtgataatacccacaattggtggaaatacccttgttattctggctgtttcactggagaagaagctgcagtatgctactaattactttctaatgtccttggcggtggctgatttgctggttggattgtttgtgatgccaattgccctcttgacaataatgtttgaggctatgtggcccctcccacttgttctatgtcctgcctggttatttcttgacgttctcttttcaaccgcatccatcatgcatctctgtgccatttcagtggatcgttacatagccatcaaaaagccaatccaggccaatcaatataactcacgggctacagcattcatcaagattacagtggtgtggttaatttcaataggcattgccattccagtccctattaaagggatagagactgatgtggacaacccaaacaatatcacttgtgtgctgacaaaggaacgttttggcgatttcatgctctttggctcactggctgccttcttcacacctcttgcaattatgattgtcacctactttctcactatccatgctttacagaagaaggcttacttagtcaaaaacaagccacctcaacgcctaacatggttgactgtgtctacagttttccaaagggatgaaacaccttgctcgtcaccggaaaaggtggcaatgctggatggttctcgaaaggacaaggctctgcccaactcaggtgatgaaacacttatgcgaagaacatccacaattgggaaaaagtcagtgcagaccatttccaacgaacagagagcctcaaaggtcctagggattgtgtttttcctctttttgcttatgtggtgtcccttctttattacaaatataactttagttttatgtgattcctgtaaccaaactactctccaaatgctcctggagatatttgtgtggataggctatgtttcctcaggagtgaatcctttggtctacaccctcttcaataagacatttcgggatgcatttggccgatatatcacctgcaattaccgggccacaaagtcagtaaaaactctcagaaaacgctccagtaagatctacttccggaatccaatggcagagaactctaagtttttcaagaaacatggaattcgaaatgggattaaccctgccatgtaccagagtccaatgaggctccgaagttcaaccattcagtcttcatcaatcattctactagatacgcttctcctcactgaaaatgaaggtgacaaaactgaagagcaagttagttatgtatagcagaactggcagttgtcatcaaacataatgatgagtaagatgatgaatgagatgtaaatgtgcccagaatatattatataaagaattttatgtcatatatcaaatcatctctttaacctaagatgtaagtattaagaatatctaattttcctaatttggacaagattattccatgaggaaaataattttatatagctacaaatgaaaacaatccagcactctggttaaattttaaggtattcgaatgaaataaagtcaaatcaataaatttcaggctttaaaaaaaaaa

SEQ ID NO: 13975 - protein, 481 aa, Homo sapiens
  ref <308>: DATABASE ACCESSION NUMBER: SWISS-Prot / P41595
  ref <309>: DATABASE ENTRY DATE: 2002-06-15
MALSYRVSELQSTIPEHILQSTFVHVISSNWSGLQTESIPEEMKQIVEEQGNKLHWAALLILMVIIPTIGGNTLVILAVSLEKKLQYATNYFLMSLAVADLLVGLFVMPIALLTIMFEAMWPLPLVLCPAWLFLDVLFSTASIMHLCAISVDRYIAIKKPIQANQYNSRATAFIKITVVWLISIGIAIPVPIKGIETDVDNPNNITCVLTKERFGDFMLFGSLAAFFTPLAIMIVTYFLTIHALQKKAYLVKNKPPQRLTWLTVSTVFQRDETPCSSPEKVAMLDGSRKDKALPNSGDETLMRRTSTIGKKSVQTISNEQRASKVLGIVFFLFLLMWCPFFITNITLVLCDSCNQTTLQMLLEIFVWIGYVSSGVNPLVYTLFNKTFRDAFGRYITCNYRATKSVKTLRKRSSKIYFRNPMAENSKFFKKHGIRNGINPAMYQSPMRLRSSTIQSSSIILLDTLLLTENEGDKTEEQVSYV

SEQ ID NO: 13976 - DNA, 2421 bp, Rattus norvegicus
  ref <308>: DATABASE ACCESSION NUMBER: EMBL / X72914
  ref <309>: DATABASE ENTRY DATE: 1993-05-05
gtcgacatgagccccactgcctgcgttctagtgctcgccctggctgccttgcgggctaccggccagggccagatcccgctgggtggagacctagccccacagatgcttcgagaactccaggagactaatgcggcgctgcaagacgtgagagagctcttgcgacacagggtcaaggagatcaccttcctgaagaatacggtgatggaatgtgacgcttgcggaatgcagcccgcacgcacccccggtctgagcgtgcggccagtcgcgctctgcgcacccggctcctgcttccctggcgtagtctgcacggagacagctaccggcgcgcgctgcggcccctgccctccgggctacaccggcaacggctcgcactgcaccgacgttaatgagtgcaacgctcacccctgtttcccgcgcgtgcggtgcatcaataccagccctggctttcactgcgaagcctgtccccctgggttcagcgggcccacccacgagggtgtggggctgaccttcgccaagaccaacaaacaagtttgcacagatattaatgagtgtgagaccgggcagcacaattgcgttcccaactccgtgtgcgtcaacacccggggctccttccagtgcggtccctgccagcccggcttcgtgggcgaccagaggtcaggctgccagcggcgtgggcaacacttctgccccgacgggtcacccagcccgtgccatgagaaagcagactgtattttggagcgcgacggctcaaggtcctgcgtgtgtgcggtcggctgggccggcaacgggctcctgtgcggacgcgacacagacctggacggtttcccggacgagaagcttcgctgctcagagcgccagtgccgcaaggacaactgcgtgacggtgcccaattcagggcaggaggatgtggaccgggaccgcattggagatgcttgtgacccggatgcggacggggatggagtccctaatgagcaagacaattgcccgctggttcgaaacccagaccagcgcaactccgataaagacaagtggggagatgcctgcgacaactgccggtcccagaagaatgatgaccagaaagatacagaccgggatggccagggcgatgcctgcgacgacgacatagatggcgatcgaatccgaaatgtagctgacaactgtccccgggtgcccaactttgaccagagtgacagcgatggtgatggtgttggggatgcctgtgacaattgtccccagaaagacaacccggaccagagggacgtggaccacgactttgtgggtgatgcctgtgacagtgaccaagaccaggacggggatggacaccaagactcccgggacaactgccccacagtgcccaacagtgcccagcaggactcagaccatgatggcaagggtgatgcctgtgatgatgacgacgacaatgacggagtccctgacagccgggacaattgccgcttggtgcccaacccgggccaagaggacaatgaccgggatggcgtgggtgacgcttgtcagggtgacttcgatgctgacaaggttatagacaagatcgatgtgtgccccgagaacgccgaggtcactctcaccgacttcagggccttccaaacagttgtgctggaccccgagggtgatgcgcagatcgaccccaactgggtggtgctcaatcagggaatggagatcgttcagaccatgaacagtgaccctggcctggctgtgggttacacggcattcaacggtgtagattttgagggaacgttccatgtaaacaccgccaccgatgatgactacgctggcttcatcttcggctatcaagacagctcaagtttctatgtggtcatgtggaaacagatggagcagacgtactggcaggccaatcctttccgggcagtggctgaaccagggattcagctcaaggctgtcaagtcctctacaggtcccggggaacagctccgaaatgcgttgtggcacacgggggacacagcatcccaggtgcggctgctgtggaaggatcctcgaaatgtgggctggaaggataagacatcctaccgctggttcctgcagcaccggcctcaagtcggctacatcagggtgcggttctatgagggtcctgagctagtagctgacagcaacgtggtgctggacacagctatgcgtggtggccgcctgggtgtcttctgcttctcccaagagaatatcatctgggctaacctgcgctaccgttgcaatgatacaatccctgaggactatgagcgtcaccggctgcggagggcctagggaccctaagaggggccccgctgaccgatggactgcggtagcatcggccacaggtgtctgggggggggggtctggcatctttctgaagggatgtctggcctggggaggaaaggcaaataaagaatgtatgtgggggaaaaaaaaaaa

SEQ ID NO: 13977 - protein, 755 aa, Rattus norvegicus
  ref <308>: DATABASE ACCESSION NUMBER: SWISS-Prot / CAA51419
  ref <309>: DATABASE ENTRY DATE: 2002-06-15
MSPTACVLVLALAALRATGQGQIPLGGDLAPQMLRELQETNAALQDVRELLRHRVKEITFLKNTVMECDACGMQPARTPGLSVRPVALCAPGSCFPGVVCTETATGARCGPCPPGYTGNGSHCTDVNECNAHPCFPRVRCINTSPGFHCEACPPGFSGPTHEGVGLTFAKTNKQVCTDINECETGQHNCVPNSVCVNTRGSFQCGPCQPGFVGDQRSGCQRRGQHFCPDGSPSPCHEKADCILERDGSRSCVCAVGWAGNGLLCGRDTDLDGFPDEKLRCSERQCRKDNCVTVPNSGQEDVDRDRIGDACDPDADGDGVPNEQDNCPLVRNPDQRNSDKDKWGDACDNCRSQKNDDQKDTDRDGQGDACDDDIDGDRIRNVADNCPRVPNFDQSDSDGDGVGDACDNCPQKDNPDQRDVDHDFVGDACDSDQDQDGDGHQDSRDNCPTVPNSAQQDSDHDGKGDACDDDDDNDGVPDSRDNCRLVPNPGQEDNDRDGVGDACQGDFDADKVIDKIDVCPENAEVTLTDFRAFQTVVLDPEGDAQIDPNWVVLNQGMEIVQTMNSDPGLAVGYTAFNGVDFEGTFHVNTATDDDYAGFIFGYQDSSSFYVVMWKQMEQTYWQANPFRAVAEPGIQLKAVKSSTGPGEQLRNALWHTGDTASQVRLLWKDPRNVGWKDKTSYRWFLQHRPQVGYIRVRFYEGPELVADSNVVLDTAMRGGRLGVFCFSQENIIWANLRYRCNDTIPEDYERHRLRRA

SEQ ID NO: 13978 - DNA, 2437 bp, Homo sapiens
  misc_feature (1)..(2437): n=a, c, g or t
cacccagctccccgccaccgccatggtccccgacaccgcctgcgttcttctgctcaccctggctgccctcggcgcgtccggacagggccagagcccgttgggctcagacctgggcccgcagatgcttcgggaactgcaggaaaccaacgcggcgctgcaggacgtgcgggagctgctgcggcagcaggtcagggagatcacgttcctgaaaaacacggtgatggagtgtgacgcgtgcgggatgcagcagtcagtacgcaccggcctacccagcgtgcggcccctgctccactgcgcgcccggcttctgcttccccggcgtggcctgcatccagacggagagcggcgcgcgctgcggcccctgccccgcgggcttcacgggcaacggctcgcactgcaccgacgtcaacgagtgcaacgcccacccctgcttcccccgagtccgctgtatcaacaccagcccggggttccgctgcgaggcttgcccgccggggtacagcggccccacccaccagggcgtggggctggctttcgccaaggccaacaagcaggtttgcacggacatcaacgagtgtgagaccgggcaacataactgcgtccccaactccgtgtgcatcaacacccggggctccttccagtgcggcccgtgccagcccggcttcgtgggcgaccaggcgtccggctgccagcggcgcgcacagcgcttctgccccgacggctcgcccagcgagtgccacgagcatgcagactgcgtcctagagcgcgatggctcgcggtcgtgcgtgnnnnnnnnnngctgggccggcaacgggatcctctgtggtcgcgacactgacctagacggcttcccggacgagaagctgcgctgcccggagcgccagtgccgtaaggacaactgcgtgactgtgcccaactcagggcaggaggatgtggaccgcgatggcatcggagacgcctgcgatccggatgccgacggggacggggtccccaatgaaaaggacaactgcccgctggtgcggaacccagaccagcgcaacacggacgaggacaagtggggcgatgcgtgcgacaactgccggtcccagaagaacgacgaccaaaaggacacagaccaggacggccggggcgatgcgtgcgacgacgacatcgacggcgaccggatccgcaaccaggccgacaactgccctagggtacccaactcagaccagaaggacagtgatggcgatggtataggggatgcctgtgacaactgtccccagaagagcaacccggatcaggcggatgtggaccacgactttgtgggagatgcttgtgacagcgatcaagaccaggatggagacggacatcaggactctcgggacaactgtcccacggtgcctaacagtgcccaggaggactcagaccacgatggccagggtgatgcctgcgacgacgacgacgacaatgacggagtccctgacagtcgggacaactgccgcctggtgcctaaccccggccaggaggacgcggacagggacggcgtgggcgacgtgtgccaggacgactttgatgcagacaaggtggtagacaagatcgacgtgtgtccggagaacgctgaagtcacgctcaccgacttcagggccttccagacagtcgtgctggacccggagggtgacgcgcagattgaccccaactgggtggtgctcaaccagggaagggagatcgtgcagacaatgaacagcgacccaggcctggctgtgggttacactgccttcaatggcgtggacttcgagggcacgttccatgtgaacacggtcacggatgacgactatgcgggcttcatctttggctaccaggacagctccagcttctacgtggtcatgtggaagcagatggagcaaacgtattggcaggcgaaccccttccgtgctgtggccgagcctggcatccaactcaaggctgtgaagtcttccacaggccccggggaacagctgcggaacgctctgtggcatacaggagacacagagtcccaggtgcggctgctgtggaaggacccgcgaaacgtgggttggaaggacaagaagtcctatcgttggttcctgcagcaccggccccaagtgggctacatcagggtgcgattctatgagggccctgagctggtggccgacagcaacgtggtcttggacacaaccatgcggggtggccgcctgggggtcttctgcttctcccaggagaacatcatctgggccaacctgcgttaccgctgcaatgacaccatcccagaggactatgagacccatcagctgcggcaagcctagggaccagggtgaggacccgccggatgacagccaccctcaccgcggctggatgggggctctgcacccagccccaaggggtggccgtcctgagggggaagtgagaagggctcagagaggacaaaataaagtgtgtgtgcaggg

SEQ ID NO: 13979 - protein, 757 aa, Homo sapiens
  misc_feature (1)..(757): Xaa=Unknown amino acid
MVPDTACVLLLTLAALGASGQGQSPLGSDLGPQMLRELQETNAALQDVRELLRQQVREITFLKNTVMECDACGMQQSVRTGLPSVRPLLHCAPGFCFPGVACIQTESGARCGPCPAGFTGNGSHCTDVNECNAHPCFPRVRCINTSPGFRCEACPPGYSGPTHQGVGLAFAKANKQVCTDINECETGQHNCVPNSVCINTRGSFQCGPCQPGFVGDQASGCQRRAQRFCPDGSPSECHEHADCVLERDGSRSCVXXXXWAGNGILCGRDTDLDGFPDEKLRCPERQCRKDNCVTVPNSGQEDVDRDGIGDACDPDADGDGVPNEKDNCPLVRNPDQRNTDEDKWGDACDNCRSQKNDDQKDTDQDGRGDACDDDIDGDRIRNQADNCPRVPNSDQKDSDGDGIGDACDNCPQKSNPDQADVDHDFVGDACDSDQDQDGDGHQDSRDNCPTVPNSAQEDSDHDGQGDACDDDDDNDGVPDSRDNCRLVPNPGQEDADRDGVGDVCQDDFDADKVVDKIDVCPENAEVTLTDFRAFQTVVLDPEGDAQIDPNWVVLNQGREIVQTMNSDPGLAVGYTAFNGVDFEGTFHVNTVTDDDYAGFIFGYQDSSSFYVVMWKQMEQTYWQANPFRAVAEPGIQLKAVKSSTGPGEQLRNALWHTGDTESQVRLLWKDPRNVGWKDKKSYRWFLQHRPQVGYIRVRFYEGPELVADSNVVLDTTMRGGRLGVFCFSQENIIWANLRYRCNDTIPEDYETHQLRQA

SEQ ID NO: 13980 - DNA, 966 bp, Rattus norvegicus
  misc_feature (1)..(966): n=a, c, g or t
  ref <308>: DATABASE ACCESSION NUMBER: EMBL / X76453
  ref <309>: DATABASE ENTRY DATE: 1994-03-09
ggcgtgaggaggttggagagttttttctgggacctaaacaaaggcacccncggccctnctaanctgaagttgagcctcacatatcctggaaaggaaaatgcccataccagaacccaagcctggagatctgattgagattttccgccctatgtacagtcactgggccatctatgttggtgatggatatgtgatccacctggctcccccaagtgaaatcccaggagctggggcagccagcatcatgtctgctttgacggacaaggccatagtgaagaaagagctgctgcgtgatgtggctgggaaggacaagtaccaggtcaacaacaagcacgacaaggagtacactccgctgcctctgaacaagatcatccagcgagctgaggagctggtggggcaggaggtgctgtacaggctgaccagtgagaactgtgagcacttcgtgaacgaactgcgttatggagtccctcggagtgaccaggtcagagataccgtcaaggtggcgaccgtcactggagtgggcttggcggccttgggcctcattggagtcatgctctcaagaaacaagaaacagaagcagtgagctgaatgactatccagctttagggctcttcttttgctagagggntggagtttgatttatagattctactgctttataattaggtatattttcacaatatacaataaaccacaagaagggaattttcatggagtacactgtagctatcttcagacacaccagaagagggcaccagatcccattacagatggttgtgagccatcatgtggttgctgggatttgaactcaggacctccggaagagcaatcagtgctcttaaccgctgagccacctctccagccctgaagggctctttcaaaggtttattctttctcctttcacaagtcggcatcgaaacttccaagtgtcctcaaagtccagggctccttggactccataacgtttct

SEQ ID NO: 13981 - protein, 161 aa, Rattus norvegicus
  misc_feature (1)..(161): Xaa=Unknown amino acid
MPIPEPKPGDLIEIFRPMYSHWAIYVGDGYVIHLAPPSEIPGAGAASIMSALTDKAIVKKELLRDVAGKDKYQVNNKHDKEYTPLPLNKIIQRAEELVGQEVLYRLTSENCEHFVNELRYGVPRSDQVRDTVKVATVTGVGLAALGLIGVMLSRNKKQKQX

SEQ ID NO: 13982 - DNA, 1070 bp, Homo sapiens; identical to SEQ ID NO: 13194
  ref <308>: DATABASE ACCESSION NUMBER: EMBL / X92814
  ref <309>: DATABASE ENTRY DATE: 1995-11-24

SEQ ID NO: 13983 - protein, 162 aa, Homo sapiens
  ref <308>: DATABASE ACCESSION NUMBER: SWISS-Prot / P53816
  ref <309>: DATABASE ENTRY DATE: 2002-06-15
MRAPIPEPKPGDLIEIFRPFYRHWAIYVGDGYVVHLAPPSEVAGAGAASVMSALTDKAIVKKELLYDVAGSDKYQVNNKHDDKYSPLPCSKIIQRAEELVGQEVLYKLTSENCEHFVNELRYGVARSDQVRDVIIAASVAGMGLAAMSLIGVMFSRNKRQKQ

SEQ ID NO: 13984 - DNA, 3913 bp, Rattus norvegicus; identical to SEQ ID NO: 11316
  ref <308>: DATABASE ACCESSION NUMBER: EMBL / X77209
  ref <309>: DATABASE ENTRY DATE: 1997-01-30

SEQ ID NO: 13985 - protein, 641 aa, Rattus norvegicus; identical to SEQ ID NO: 11317
  ref <308>: DATABASE ACCESSION NUMBER: SWISS-Prot / P55063
  ref <309>: DATABASE ENTRY DATE: 1996-10-01

SEQ ID NO: 13986 - DNA, 31737 bp, Homo sapiens
  ref <308>: DATABASE ACCESSION NUMBER: EMBL / AF134726
  ref <309>: DATABASE ENTRY DATE: 1999-03-29
gaattcattaaaaatttttttacggaaaagctcaaatttttcattttaaaatatttctcttttttcttttttcagaacatttctcacttacataagagcacattttctttctctttttttcagatagagtctctttgtgtcacccaggctggagtgcaatggcgtgatctcggctcactgcaacctccgcctcccgggttcaagcaattctcctgcctcagcctcccaagtagctgggattacaaacggctgacaccacgcccagctaatttttgcatttttagtagagacggggtttcaccatgttggccaggctggtctccaactcctggcctcaggtgatccgcctacctcagcctcccaaagtgctgggattacaggcatgagccaccgcgcctggcctttttttttttttaaaattccaacttttattttagatacagggggtacaggtgcaggtttgttacatgggtatattgcactaggtagtcatagaaccaattaggtaattttttaacccacactccctccctctctccccttctagtagtcttcagtgtctattgttcctatatttatgtccatatgtgctcaatatttagttccgttataagtgagaacattaggcatttggttttctgttcctacgctaattcatttaggattctgtcctccagctccatccatgttgctgcaaaggacatgatttaattttttttttttatggctgcaaaactatttatctttcacttcttggcttttaccaaaataaaatgtttcttttgaactataaatttataaaacatctcattgttctctgtatcataatttttttctttttttttttttttctgagacagagtctcactctgtcacccaggctggagtgcagtggtgccgtcttggctcactgcaacctccgcctcctgggttcaagcgattctcctgcctcagcctcccaagtagctcggattacaggtgcccaccagcacgccggctaatttttgtatttttagtagagacgaggtttcaccatgtttgccaggctggtctcaaattcatgatctcaggtaatccacccgcctcggcctcccaaagtgctcagattacagacatgagccaccacagccagcctttttttttttttttttttttgttgagatggagtctcgccctgtcacccaggctggagtacagtggcgctatctcagctcactacaactccagcctgggcaaaaggagcaaaactctgtctcaaaaaaaaaaaaaaaaagggcagagaactaatgcccagagtcaacctgcaattattgcagagtgggaagcagtagacagatgctcctgcctcctgtccttcaggtggaaagcgtctggagacattcagctctctcctcaggagggcctgggggaatcgaactccactgcacacaacagtgacatcactctttttttttttttttttttgagacggagtctcactctgttgcccaggctggagtgcaatggtgcaatctctgctcaccgcaacctccgcctcccaggttcaagcaattctcctgcctcagcctcccaaatagctgggatgacaggcacatgccaccacgccaggctaatttttgcaattttagtagagacagggtttcgtcgtgttggccaggctggtctcgaactcctgacctcaggtgatccacccacctcagcctcccaaagtgctgggattacaggcgtgagccaccatacccggccaacatcattctcttaaactggcctttcctccttcaggatctcacactccctatagcctcgcttctgctttctgggatcacctaaattaactacctacggccaagtcctgtctcaagctctgctgtcagggtcaccaaaattaagatcatccctttccatcctcctctccctataaactactgcccttcttccacaaactccttccacgccagcaaacccagactgtaacattaacacagagttataatccatccatatactggtctctccacattcctggagcacaaactgctaaagggtaggaacgctgtgacacgtttggttcccccactgtccagtgggagagagatatgtgagccagtcagcgctacaccgagttgaggcagccattgaggctcttcatgaattttcccgttttctgccttccaggcacatgataggatggaattcctcagccctcctgaagttaggccactgcaagaggcctaactggcttgctttggccagtgaaataagagcagaagtcacatgtgttgttactgtcaggcacaagtatttaactgccaatgtaacacaagacactccagcaccctcttttgatggagcctcctttgatctggatgcctgagtgactatgatgatcagagactctaacactcctactgacccaacagagagcaatagtgagaaataaaactgttgtgttaagctactgagattccagggttgtttgttactgcagcatgatgtagccatcctgactgatacaagctgagataggagtccatataaagttcacagggacacaaacaggggaatattaggtctctctagaagatcagaaaggtttcatcaatgaacttgagatagccttaaaagatgagtgtttacctgacaaggaagagatgcaagcatccaggtgagcaatgaaaccccagagcgcattaaaggaactgcaagttcaggacctttcagggctggggagggaaggaaggccacaatgacactagaccagggaggaaggagagaatgccttatggaagaaacagcatttacagcttgtaaggcgatttgctatatggaattttagataaggaagtgatatgatttgatttgcatttcagaaatattattctggaatcagtatgtaggggctggaagaccagttaagagacatttagagtcctggcaagacaacaggggctaaaagcaagcacagaaatgaggaagggaaagccagcaccaacgttgaggcatagaccacggggcccctgagccctcctctgactctcagaacacctgggtgtcttatcacattgcaccatgactgcttgttcattgtttttgttgttgttgttgttgttgtgatggagtcttgctctgtcgcccaggctggagtgcagtggtgtgatcttggctcactgcaagctccgcctcccgggttcacgccattctcctgcctcagcctcccaagtagctgggactacaggcgcctgccaccacgcctggctaatttttttgtatttttagtagagacggggtttcaccgtgttagccaggatggtctccatctcctgacctcgtgatccacccgtctcggcctcccacagtgctgggattacaggcgtgaaccaccgcgcccggccgattgcttgttcattaactatagtcttcttttttttttttgagacggagtctcactctgttgcccaggctggagtgcagtggcacgatctcggctcactgcaacctctgcctcctaggttcaagcgattcttctgcctcagcctcccaagtagctgggactacaggcatacaccactacgcccagctaatttttgtatttttagtagagatggggtttcaccatattggccaggctggtctcgaactcctgacctcatgatccgcccacctcggcctcccaaagtgctgggattacaggagtgagccaccgcgcccggccactcaggcaggatttctatgtgacagtcttgaggcagaattccttctctgggaaacctaagtctttgctctttaggccacaatatcaagagtaatctcctggctgggcgtggtggctcacacctgaaatcccagcactttgagaggccgaggcaggcggatcacaaggtcatgagattgagaccatcctggccaacatagtgaaacacggtgaatacaaaacttaactgggcgtgttggcatgtgcctgtaatctcagctacttgggaggctgaggcaggacaatcacttgaaccagggagtcggatcgcaggttgcagtgagccaagatcgcgcctgggtgacagagcgagattctgtcttaaaaaaaaaagggccaggcacggtggctcatgcctgtaatcccagcacttctggaggccaaggcgggcagatcacgaggtcatgagttcaagaccagcctggccaacatagtgaaatcctgtctctactaaaaatacaaaaattagccgggtgtggtgcctgtagtcccagctacacgggagcctgaggcgggagaattgcttacacccaggaggcggaggttgcagtgagccgagatcacgccactacactccagccagggtgacagaatgagactccatctcaaaaaaaaaagagtaaactcctttacttaacgtcagctgagtatagatggcaatgtctttgcttcgttttatttttttgagatggagtttcgcttttgttgcccagacttgcccagactggagtgcaatggcacggtctcagctcactgtaacctctgccttccaggttcaaatgattcttgtgcctcagcctcccaactagctgggattacaggtgcctgccaccacacccagctaatttttgtatttttagtagagatagcggttcaccatgttggccaggctggtcgcgaactcctcacctcaggtgatctgcccaccttggcctcccaaagtgctccaattactggcgtgagccactgtgcccagccaagatgtcagtgttatctacaaaatgccctcactgaagtatccagactacagtcaggcatggtggcatgcttgtagtcccagatacccaggaggctgaggcaggagaatcacttgagactgggagttcaagttcagcctggagaacatagtgagagtctatctcattaagataaataataatgcaaatgtgtatatatacagtgcccaagggcaccatagccttgccaaattgacacatcttttttttttttttttttttttttgtggaaacagggtttcaccatcttacccagagtggtcttgaaatcctgggctcaagtaatcctcccaccttgccctcctaaagtgctgggattacaggcgtgagccactgcgcttggcctgacacataaaattaaccatcacagagtcatcaatgtggtaaccaatctctctttttttttttttttcttttttgagatggagtcccgctctgtcactcaggctggagtgtagtgatatgatctcagctcactgcagcctctgcctcccaggttcaagcgattctcctgcctcagcctcctgagtagctgggattacaggcacacaccatcaccctggttaattttttgtattttcagtagagacagggtttcaccatgttggccagactggtctcgaactcctgacctcaggtgatccacctgcctcagcctcccaaagtgctcggattacaggtgtgagccaccgtgcccggcctggtaaccaatctctaaagagcacatggtaccacccagagagaatgagataaaggcctagaaggccaaaggcatcaacagaggaaaaggtcaagacaggaaaggagtgagggtttatagaacagactgaaattatagaaggaagggagcctggatacaggggtgtcatggaaaccagggaaaagcagtggatcaaacagtgtggtcaagtatgtcacagactgcagaaagctcaagtaagaggagcactgaataatatccattaaatttgaagcctttatatcttttttcccaagaagcaacagtctcatggctggtgtacaactgcttcagaaaatagtttagcattagcagggaagctgaacaggtgcagacctcaacatccagcaactccactcttacgaatatgtggatgcttgctactcagactgtggtccacagacagacagcatcagcatcagcaggaacttgtagaaatgcagaatctggccaggcacggtggctcaacgcctgtaatcccagcactttgggagactgcagtgggcggatcgcttgagcccaggagttagagaccagccttggcaacgtagtgacccggtctcaaattggaaaaaaaaaaaaaaaaaaaaagggccagacatggtggctcatgcctgtaatctcagcactttgggaggctgaggcgggcaaatcacctgaggtcaggagtgcgagaccagcttggccaacatggtgaaaccccatttctactaaaaatacaaaaattagccaggcgtggtggcatgtgcctgtagtcccagctacttgggaggctgaggcaggagaattgcttgaacccgggaggcggaggctgcagtgtgccactgcactccagcctgggcaacagagcgagactctgtctcaaaaaaaaaagagagagaaaaaaaaaaaaagaaagaaacacagaatctcaggccccacccagacctactgactcagactccgaattaaaactccagatgactcatgtgcatgctgatttcaagaagcatgtaatcttcaaacccttttgctcacattaaaagaattttgcaaattatgtaccccttgcatgtttttatgctgctatctaaaactttccccaaatgtttagttgcaaaagaatgccattccagtgtgttgtaaacatggatcttttttaaaaagtcttatttcactttttaaccattcccttcatgattcattttatttttttttttatgtatttatttgtttattttttgagacaagagtctccctctgtctcctaggctggagtgcagtggcgccatctcggctcactgcaacctccgcctcccaggttccagcaattctcctgcctccacctctcgagtagctgggactacaggtgcctgccaccacgtctggctaattttcgtatttttagtagagacggggtttcaccttgttgctcaggctggtctcgaactcctgacttcaggtgatccacccgctttggtctcccaaagtgctgggattacaggcatgagccaccacacccagcccaattcattttatttatttattttttattttatttttaagatggaagcttgctctgtcacccaggctggagtgcagtggcacgatctcggctcactgcaacctctgcctcccgggttcaagagattatcctgcctcagcctcccgagtagctgggattacaggcatgcgccaccacgcctggctaatttttgtatttttagtagagatgggggtttcatcatgttggccaggctggtcttgaactcctgacctcaagtgattcatctgcctcagcctcccaaagtgctgggattacaggcgtgggccaccgtgctgggctcatgattcatttttaaagtacatgattataatcttctttaacagtcagaaatttcacattgttctatttcttctgaattcttattttcatagttctatttctacccccaagacattatcctaatgtaatacattttgtgcttgaaagccttctaagcctgagcaacatggcaaaaccctgtctctacaacaaataacaaaaattagctgggtgtggtggcgtgtgcctgtagtcctagctactctggaggctgaggtgggaggatcacctgttcctggggaggtcaagcctgcagtgagtcatgattgtgcattccagcctgggcaacagagtgagaccttgtcaaaaaaaaaaaaatgagcaaagaacttgaatagatatttctccagagaagacacacaaatggccaacaaggacatgaaaagatgctcaacatcattagtcattaagtaaatgaaaataaaactataatgagtacaacttcatatcaactagaatgtctatttaaaaaaaaaaacaagccaggcgcggtggctcacgtctgtaatcccagcactttgggaggctgaggtgggcggatcacaaggtcaggagttcgagaccagcctggccaatatggtgaaaccccatctctactataaatacaaaaattagccaggcgtggtggcgcgtgactgtagtcccagctactcaggaggctgaggcaggagaatcccttgaacccgggaggcagaggttgcagtgagccaagatcgcaccactgtactctagccggggcaacagagtgagacgctgtctcaaaaaaaaacaaaaaacaaaaaaaaacagaaaataacaactgttggcaaggatatggagaaattgaagcttgtgtacaatctcctggtgggaacataaaatggtgcagctgctgtggaaaacagtttggcagttcctcaaaaggtttaacatatagggtgggcacagtggctcacgcctgtgatcccaggctgagaggaatttgggaagctaaggctggaggatcgcttgagcctagcagttcgagaccagcctgggaaacacagcaagacttcatctctacaaaaaaaaaaaaagaggtgggcgggggagcaaatgccatggctcacgcctataatctcaacaatttgggaggccaaggcaggcggatcccttgagctcaggagttccagaccagcctgagcaacatggtgaaaccctgtttctacaaaaatgcaaaaattagccaggcatggtggtgcatacctgtagtcctagctactcgggaggctaaggcgggaggctaagcctgggaggtggaggttgcagtgagccaagatcacaccactgcattccagtctggtcaacagagatcctgtctaaaaaaaaataataataataatacgttaaaaatttaacatataattgccatataatccaacagttccactcctaggtatatatccaaaagaactgtaaataggtatacaaacaaattctagtataagcatccaattaaaagacaatgaatgaattacagctacacaagtcaacaaaaccataatgttgagtgaaaaggccagccccagaacatgtacagtatgattcatctgtgtgatggtcaaacagacaaaactaaactgtccgggaaaacctacaactgcatagatactgaaactattacaataagcaaatgaagtatacacggtcatacctcagagatattttgggcttcgttccagatcccctcaataaagccagtcatatcaacaactttttggtttcccagtgcacacaagttatgtttacactgtactgtagtctattcagtgtgcaatagcatacgtctaaaaacaatgtatgtaaccttaattttaaaatactgtattgctaaaaaatgctaacagtcatctgagtctttagtgagttgtaacatttttgctggtggaggattttatcttgatatcgatagctgctgactgattagggtggtggttgctgaaggttgggatggctttgacaatttctttttttcttttttttttttttgagatgaagtctcatgctgtcacccaggctggagtggagtggtgcaatctcggctcattacaacctccatctcctgggttcaagcaattctcctgcctcagcctcccaagtggctgggactacaggcacccccaccacacccagctaatttttgtgtttttagtagagattgggtttcaccatgttggcccaggctggcctcgaactcctgacctcaggtgatccgcccacctcagcctcccaaagtgctgggattacaggagtgagtcaccccacccagccaacaatttcttaaaataagacaacaatgaaatttgctgtatctactgactctaacttttataaaaagatttatctgggccgagcacggtggctcatgcctgtagtctcaacactttgggaggccaaggcaggagtatcacttgaacccaagaattcaagatcaatgactgggcaacacgggaagacccagtcttgccacttttaattaaaaaaaaaaaaaaaatggccgggtgctgcggctcatgcctgtaatcccagcactttgggaggctgaggtgggcggatcatgaggtcaggagttcaagaccagcctggccaacatggtgaaaccccatctctactaaaaatacaaaacattagctgggcgtggtggcagacgtccgtaatcctagctactcaggaggctgaggcaggagaattgcttgaacctgggaggcagaggttgcagtgagctgagattgtaccattgcactccagcctgggcaacaagggcgaaactccatctcaaaaaaaaaaaaaaaaaaaaaaaagccagaagtggtagcgcacgcctgtagtcccagctactccagaggctgaggcaggagaatcacttgaacctggtaggtggaggttgcagtaagccgagattgtgccactgcaccccagcctggcgacagagcaagactctgtctaaaaaataaataaataaattagtccaggaaggtcgaggctgcagtgagccttctttgcaccactgtactccagcctgagcaaaagaaaccactttttttttttttttttttttttgacagggtcttgcgccatcacccaagctggagtgcagcagtgcgaacaaggctcactgcagccttctcctccctgggctgaatcaatcctcccacttcagcctgttgaatagctgcgaccacaggcaacaccacctcccacagctattttttttttttctgagactgggttttgccttgttgcccaggctggtttcaagtgatcctcttcccttggcttcccaaaagtgctgagtttacaggcgtaagccaccacacccagccttgtaccctcttatattttttaaattttgaacaaaactttacaatttgaatttggaattgtacttacacattttgaattttgaacaaaactacattttgaattttgaactttgaattttgagtttgtaaacaaaattttacaaactctaatgcttttattttgctttttttttttttttaagacagagtttcactcttgtcacccaggctggagtgcagtggcgtgatctcaactcactgcaacctctgcctcccaggttcaagcaattctcctgcgtcagcctcctgagtagctgggattacaggcatgcaccaccacgcccagctaattttttttgcattttcagtagaaacgaggtttcaccatgttggccaggctgttctcaaacttctgacctcaaatgatccggccacctcagcctcccaaagtgctgcgattacaggtgtgagccactgcacccggccctacaaactctaattcttaacttgacagctttttgtatttctgctctcacgaatgactccatgaaaaaaataaaatgaacaattttttttttaaacttgggatatggattaggtcatttgcagggacacaggcaggcctggggaggacaacctgatccaggcaggtatcacaggcccgaaagtcagttgctcaagcagcaaggatgacatagggtagcagagcagacttggtgaggctcagaggatagaatatttgtcgagaagtggaagagtctttttctgtctggaattcacaaggtgctgggagaatctgcctccatttccccagatagacctggatctgggcagagtcagcaagggtgtgtggaggacttggacgatggcaaaggtggtgggctgcagggagtaaattccctccgaggtaggagggggagggaagagtttgtctggaggcaggttgaggctgggagagggctccgaagagctagggataaggagctctgaagaaggaggaggagccagcattgaggagcagtcaagggggatggatgggagttcagaaaaggtggttttgcagatggatgggagtggtgcaggcactttgttttcacatggcttctttccccaagcagtaagccccttccaacattgccaaaacatcctgcagtttttaccagggttcctgcgctgagggcagagctgagtgcagatcaaaggagaaagagaaagaagttggaggttttgttgtaatgtaagacagtttcatcagcctatggatttaaaagtccaggctgacttacctcttcctttcctatagattgctcaggaaatatggttattctagtacgtgctaagcatcgttgtaaaaagtaagcccacagcctaaaatactttgaatgtcttagacaaatgtccaatgtttgctacggttttggattatcaaggccactccttacctctatgagtagccaagggtagtgctctaagctgtgagctagcttctctcagagatgcccacaaacataaacaccccttttcaaagtaagctgctatggactcataggactggaaaatacttcagagagtaatccctccattttattaaagagaatactgaaacctggggagccttgatgacttcaagatggactggaacctggaccttttgtctcctagttattccttgcatccctagtcaaattttatttcctttaaaaaatgtatttacttttatttattattatttttgagacaggtgtctcgctttgttgcccaggctggtctcaaactcccggccttaagtgatcctcccacctcagcttcccaaagtgctgggattacaggcataagccacagtgcccagcccagattttatttctaaagctcactaagaatcctaatttttttttaaaagacagggtctcattctgttgcccaggctggagtacagtggcactatcatggttcactgcagcctcaactgcctgggcttaagcagtcctcccacctcagcctctcatgtaactgggatcccaagcacatacacaccatcatgccctgctaattttcttattatttgtagagatggggtcttgctatgttgcccagactggtctcaaactgctgggctcaagggatcctcctgcctcggcctcccaaagtgctgggattacaggaatgaaccattgagcctgacccaaaaatcctaaaagtatctcctaaatttatctgttcttgacaccacaccaaggcatttggtactgcaagctaaggacaggaaagcccctggttttatactggcagaagttggggaagaagggacaaggatctagatgattgtaaaccccctggatgggatgcatgggaaatggctccacatcatctctccaccagactacatggaaaagagtttgtgcacctctgcttgtttttacgcagagttgtaactgggtgggctggacacttgaaggattcattggctgtcaactccacctgccaccaaggactacctgtcttgagccatgggctgagattaggccccctgtcccatctacattcctagaaaggaaaagtagcaagaaagggacaagaaacaaaattttacaaactctaattcttaacttgacagctttttgtatttctgctctcactggaatgtgaactattcttctgagaagtttggcaatgcggaaaagaagagatgagatagaaaaacagaatttttaaagttcttttgggtcaggcgcagtggctcacgcctgtaatcccaacactgtgggaggctgagcaaggtggatcacccgaggtcaggagttcgagaccagcctggccaacatggtgaaaccccgtctctactaaaaatgcgaaaattagctaggcatggtggcgggcacctgtaatcccagctacttgggaggttgaggcaggagaatcacttgaacctgggaagcggaggttgcagtgagccaagatcgtgctattgcactccagcctgggtgacaagagcaaaactccagctaaataaattaattaattaattaaaataaaataaaattcttttgaaaatttcatagtccgtttcccagattaggaaaaggagaacagagctattgtttactcagcaactactgcatgccaggctcatttaaacctcacattagccctgtgagagatcagggccttcaagataaaaatgctttcagatgagctaaggatgggcgggggagacaaagataaggacactgtgattcagagaattaagtaacttgcccagtgggcctcatttggtacaggaatagggcttttattttatttttttaatgatttgcgaatctggcagccttctgagccagagtaggctcagaaactcctaggaatgtggctttaagcctaggtgcgtctgacacaaaatcaggtgttcttcctcaaatctacaaggcctaaatacaaagagagcagtttagaacagactcttagattcaacagagggaactgggtgcgggcatacaaatcagagaatttaaaagaaaaaggcaaaaagtcaaggtaccacctaaacactgtctacgctgcctccaccctcctgccaaacagcatcccttgagttcaagaattcagtttcagctcaagaacaaactttttatgggtggatgctggctgagccaaagaggaattacttcaacaatcatttgttgcatgaccttttttggtgttttgttttgagaaggagtcttgctctgtcgcccaggctggagtgcaatggcgcaatctaggctcactgcaaccttcacctcccaggttcaagcgattctcctgcctcagcctccccagtagctgggattacaggcacctgccaccacgtccagctaatttttgtatatttagtagagtcagggtttcaccatgttggccaggctggtctcgaactcctgacctcaggtgatccacctgcctcggcctcccacagtgctgggattacaggcgtgagccaccacaccctccctattgcatgatttttatttgcaaaacaaaacccacaacataattcctgcaaccaagaagtttatagtctaatggggaaaccagatattgaacacataataagaaacttcatcagaattgaaatgtaaggaaaacgcactagtctcctgaaggacgtaaaaaagaaatccaattggcaggaaacagtggcatcttcacgcggacttggataggtggggaagtgggtgtaggtacgaggaagtggaagggaaggcaccagccttcaagacgctcctaagtgctgtcgctgaagctgtggagactataacttagtctgagagagacaagagaaagagaaggcccgggcgcagtgttgaagggaagttttgtttagagctggaccttgtcagtctggaggagaggtgaggaataagggggacggagcggtggaagattagagtagaatcatactaacataataaatcacatcattaaaattagtcctagggttaattatatactaaaggtgaaatgggcaaggtcatcgatagcacaagcggagggcgactgccttggcaagaagttgggatcaatcctgagaatggaggggagggcgggtgtgattttaaaggactgacatggagtggaggaaagttgagggcactggatcgtctggctttgtggaaagtgaaatcatatttcaggcctgaagggctgaggcggttactagctttacaagagttggaaaagcctgggaatgtgtctggagcaactgtgagcacactcagcagaggaggcaggcgtgggtaatagctaccaacagctctgttagccacggggcggatggggccctgagaggtgccacggatgcacccagggcagcgctcggcacagctggaccggagacgcaccacccctgggagcaggtggcagcgcccgcagccgagagaacgggtgcgcgcgcgcgctgcgggatgcggcgcgggcggggcgcggggacgcggagcgagtagcgccatgggcagccgggattggggggcgggcccgagtgagcgggcctccgcgcggcacttggcacgcacgcgcaaactggccgcggggcttggaggtacagaggagggggagcgagaaagaggggggtgtggaacgtatttccgctctggcggacaaataatcccggccaaagaggaggcaaggccgtccggccctttaaccgcgtgggggtgctggtgaagaaaggggggtcgggaaggggggatcctgctcctttaattccctcccctcttcctcctccccgagtcctagccgacgccgccgccgccgcgcgcgcggggcctggaacacacggcacgagccgcccccgcccctccccccttacgcccacgcggagccggccccgcgcgcgcgcgcgtcccgtgcatccccgcgcctgcgcgctgcccaggccctgcccgtgtgtgggggtcgctgccggccccgggggggggtggggaaaataagggattaaaaaaacagcgcgcggaaccgggccaggtgagaggagcgtgcactcagggtcgtggggctgggggggcgtgccacggagctctgagcgtgggggcagggcgtgcacggtgcgtgctggcggcgggggggaggacgtgaaaagcgcgtgcaaacgtgtaaggggggggcggaggaatgaggcagccggtaaagggggcggggtgagaagagcctgcaaccggggccaccttggagtccagagccccaggcctctggcccccctttttctccgtccttccaccgtgggcgcgcgggctcgccccatcctagcgggctgctgggctggggggtgtggacgccgctgccccgcccccgagaaccacgcctccctcctctcagagggacagcacctccccagggttggggaaactgaggaagaaatctgaagaccgggagatcggatgccggggggctgggcaagaatgggggcgagggtcctggagccttggcttcggagagccagagacctttgtctctgaccggtttccttcccaaccagggttgcccacccccgccacaatggcctctggggtggaagtcctgcgcttccagctgcccggccacgaggccgcaacgctacggaacatgaaccagctccgggcagaggagcggttctgcgacgtgaccattgtggccgacagcctcaagtttcgaggccacaaggtcatcttggccgcctgctcacccttcctgcgggaccagttcctgctgaaccccagctcggagctgcaggtctccctgatgcacagtgcacgcatcgtggccgacttgctcctctcctgctacacgggcgccttggaattcgctgttagggacatcgtcaactaccttacagccgcctcctacctgcagatggagcacgtggtggagaaatgccggaatgccctcagccagttcattgagcccaaaataggcctcaaagaggatggggtcagtgaggctagccttgtgagcagcatcagcgccaccaagtccctcctccctccagccaggaccccaaagccagccccgaagcccccacccccacctcctctaccccctccactcctgcggccagtgaagctggagttcccactggatgaagacttggagctgaaagccgaggaagaggatgaggatgaggatgaggacgtgtctgacatctgcatcgtcaaggtggagtcggccctggaggtggcacaccggctcaaaccccctggaggcctgggagggggtctgggcattggaggctccgtgggtggccaccttggggagctggcccagagcagcgttccccccagcactgtagccccaccgcagggtgtggtgaaggcctgctatagcctgtcggaagatgcagaaggggagggcctgctgttgattcccggaggccgggccagcgtgggggccacctcgggcctggtggaagcagcagcggtggccatggctgcccggggggcggggggcagcctgggggcggggggcagccggggacccctgcctgggggcttctcaggtggaaaccccttaaagaacatcaagtgcaccaagtgcccggaagtgttccagggcgtggagaagctggtcttccacatgcgggcgcagcacttcatcttcatgtgccctcgctgtggcaagcagttcaaccacagcagcaacctcaaccgccacatgaacgtgcatcgtggtgtcaagtcacactcgtgcggcatctgcggcaagtgcttcacacagaagtccacccttcacgaccacctcaacctgcactcgggagcgcggccctaccgctgctcctactgcgacgtgcgcttcgcccacaagcctgccattaggcggcacctcaaggagcaacacggcaagaccacggccgagaacgtgctggaggccagtgtggccgagattaacgtcctcatccgctagccgcgcaggcgtggaggccaggaggctggggcccctgggctgcgtggaaaaagggctctttggcccaggagaattggggggtggggggtctggggcagaaaggtaagagtgggaggctgagcagatgcacacatcctgagagagggaagatgattccttggagagacttgctcttgagagtgcaagaatctggagctgggaaaagggttcttggaggccaggggaatacggggtcccagagaaagatttccttctcttagaagtgcatgtatatgtggagggagggaaaagggtcctatagaatgagggaagacaaaaatgttttattcctggctaaggctgcccaggggaaggttctgacatttctcgagataagaagggttggggggtgggtgggaacagggagggaatttggcaggaggacatgctcctgcttagaatagacctggggtgagggagtggtaaggggaaaagattactgagtcccagaaaaggaagtgggagacagttcttgcatgctggggaaatgagactgcgagtatgaggcttgctgaaatttgagggagaacaaagtaagacgccaggtaagagaacgtggggtgcgcatcctgggtagatattgggaagtgggggtacaatagcaagaaacaatggatagtcatgggggtgggggggatagggcacttagaaaagaaagaacacaagaagggctgttgggagggagggagaggagtagagacatacagtattttttaagaaaaaacatattttttaggattttttctggagtttggggttttagtttttctgcttttgttttccacaaaataaaaaacaaaaaaaaacttttttttttcctttacactctggcaactgcgtgtacatgactatcctgccctagacagcctctccctgtgatgctgcgttcttaatacctagaggtcacaactctgcatatcccttgcctgaaggagcccagccctaaacatgggagaggagtgtgacaagtgagctcctctggtcagggactcccccaagtccccacccccagccctccaccagttctgcaatctcaacacttagccaggtacctcacagtacaagtgattggcagtcgtggggatgcacatgaactctatttgagggacttaggatcagtgctagggatgagctacaggtggccaacctgcccacggaaattgtaagcaggagtctgtttggtcatattttgtctggggtaaataggtcatgtcttcaggaaagctaaaaaaaaaaaaaaaaagctaagtttggattaaggtgcagggaaaactacaattcccagaaagctctggaatagttaaccaaagagaactacagttcccagaaggcctttaattggcctcaggtgccccacctgcctgtgtcaaatactgcgtgtgaaatcatacagatcttttccaaactcgaccaaaacgtaatacctaaagggatggtaccctaaatacagctatcgagattgtctatcttggtgtatatcatttatacttaaattgtccgctgggctatgacccacggagtacctgactgtgcttatgaagtgttcggcaaaaaaggtttacttactgcagtgtcaccagtcagtaatgacgttcgggccgctgggcttacctggatccctagtgcgtgtgaaggtgtaacacgcctgatataaacagaagagacatttagccacaggttttcagaagggcacgctgctccaggggacatgaagcagcatgctagaaccagccaagaataaaggtgtcctccgcgtccctatcgccccttcgtgctcgttagaaagagcaaaaaggcgaggccaaaactgaggccaagccttctatctggtaacccaaaaactagaaaggcagaaaagcaaccagaggcgggaaaagcccaaccaggccagaggaaatacagccgctgccgagagccgagaagttcagaagctccgcttgttacctaaaaccagatggggacagagacgccacacctgggcccaggcgtgtctcgccctcggtccctgcagaactgaggccaggaatgacaggaattctcccttgcagctcccagcttaggacagtcacagccatctccgaggccgctctcaggggaaaatggccaaaaagcatgtagcggctcctttaaggctcctcctcgccctccctccctcgcccacgtgacccggggcggccgcgcgccggctcggcccccagcgcaagcggcgatggcggcggcggcgggagctgcagcggcggcggccgccgaggtgcggaaggggagggggagaggcgggtgcatgcccgcgcgcgcgcccgggggaagcgcgcgcccgtgcaatgctccgggggtgcaacggggccggggggcccgggcgggacttgcagcaatccagggggccagcaccgggggcggatgaggggaccagggtgtgggaggtggggggagtgggcacggaggcgcgcgtgcagccgccggctgcccctgagtgggcgacgggcgccggggccccaggagcacgcgtgaggggcacgaggggccgtccaccgggctggggggcagcgggtgctggaggggttggtgcccggggtccccgcggcctgggggacaaagggggagcggcgcgtgcagccgggaggagggggcggggccggggcgcggaggccccgccccctccccctcctcttctctcggccccagagatgcggggtctaccgagagggagggggttgatgcgggcccgggggaggggtcgtgcggcccctccgggcagccgaggccgcggaaggggggggccccacagaggaagaggtaggccccggagcctactctctcttcccagggcccaggcatcctggaccccccaactctctactgggctgaccagccctcctgtcccttgtctcccctcccagggggaggcccccgctgagatgggggcgctgctgctggagaaggaaaccagaggagccaccgagagaggtgagtgcagctaaaacgggccccaattggaccgtcaccttccctaaacacaggatctcctgagcccttagctctgaactttttctcttcctctacagttcatggctctttgggggacacccctcgtagtgaagaaaccctgcccaaggccacccccgactccctggagcctgctggcccctcatctccagcctctgtcactgtcactgttggtgatgagggggctgacacccctgtaggggctacaccactcattggggatgaatctgagaatcttgagggagatggggacctccgtgggggccggatcctgctgggtgagaggctgggtagcctggggggttggtgggaaatttctgactcttgccttctttcttatcttgccttttgcttgcttgttttctaggccatgccacaaagtcattcccctcttcccccagcaaggggggttcctgtcctagccgggccaagatgtcaatgacaggggcgggaaaatcacctccatctgtccagagtttggctatgaggctactgagtatgccaggagcccagggagctgcagcagcagggtctgaaccccctccagccaccacgagcccagagggacagcccaaggtccaccgagcccgcaaaaccatgtccaaaccaggaaatggacaggtgagtgggatgggagagatgggataatcaaccataaacctttggtgagctcttttacagtttcacttaaggcttctactccatttactcattcacatatttaagcaaggggctgctgtgtgtcaaatattaggctgtgcttgatctgtgaaccaacagacaggttcctctcttcctgcagtttacattcttgggtggtgaaagtttgatgttaaagagtcaattatatagttaatgtcttaattactcttatgataatgacaaggtaagggaatttcaaaccactcttcctttctacctcaaagcaagcccttggggaactcatctgtcactgctctatttgtaaagtttttcctgggaatcccagtgggaaaggagatgagggccacagaaataatagaggagggaagtgacaagggcaccagaagctttatgaccaagttctagggttcttgggtcatacctattgttgacctaaaggaaaaaactgaggcaaacttaacattaagtaaagtatatttggtcaggttttgaggacagcctttaggagcaaagattcaagttgccgtgaaaatacactctgattagcagcagttataagtaggggtttttttgtttgttttgttttgtttttgaagacagtttcactatgttgcccaggctggtctcaaactgctgggcttcagcaatcttcctgccttgacctcgcaaagtgctgggattacaggtgcaagccaccacaaccagcccacaagtaggtttttaaaggaaaagaagattggatgacgtgaagatattgaaaaaaaacaggctgactctgggcacactgcgtaggagttagccctgctctggaaggagccgcaaaaagaaaaaaaaaaagataaaaattttttaaaagattgaagaaataacaaaggaaaagaagaggcagttcctaaattgtttaccagtttacattagaataacaagctattgatctgctatacattgttctttgtctcacagatattaggcacatgaagataatgggtgaagcagcaccctagtcaggtacaaaatgcctttaagcagttgcctccaggcatgggccctaaccgttccatgctgacttctcgctgagcctgatcaattttgcctgcttcacatagcacaggttgctatgagctacctttcctttctcactatgataaacattaatttttatagttgcaattcattttgtaaagaatagggaagaaaaggaaaattgaatttataaattaggtacagtgagagattaacaacaataataacataatagcgtaatcctaacagtaggccaggcgtggcttgcctataatctcaacactttcagaggccaaggccggcaatcacttgaggtcaggagttcgagaccagcctggtaaacatgtccaaaccccgtctctaactaaaataataataataataataaattagccaggtgtggtggcgtgcgcctgtaatcccagctagtcgagaggctgaggcaggagaatcacttgcagtgagccaagatcgcgccactgcggttcagcctgggcaacagagcgagactcaaaaaaaatagcacaattctaacaatatgccaccatcactgctgatgaactggataagaggggactagtgtcacgtaaaatttaccatctaaaaaacaattttaggccaggcgcagtggctcacgcctgtaatctcagcactttggaggccgaggcgggaggatcacctgaggtcaggagtttgagaccagcctggccaacatagtgaaaccctgtctctactaaaaatacaaaaattaggccaggcggggtgcctcacgcatgtaatcccagcactttgggaggccaaggcaggtggatcacctgaggtcaggagttcgagaccagccggacgaacatggtgaaaccccatctctattaaaaatacaaaattagccgggcatggtggtacatgcctgtaacagtccgctacttgggaggctgaggcaggagaatcgcttgaatccaggaggcagaggttgtagttagccgagatcctgccattgcactccagcctggacaacaagagcaaaactctgtctcaaaaaaaaaaacaaaacaaaaattagccgggcgtggtggcatgtgcctgtagttccagctactcaggaggcagaggtgagagaaacgcttgaacctgggaggtagaggctgcagtgaactgagattgcgccactgcactccagcttgggcaacagagtgagactccatctaaaaatttaaaaataaaataaaaaacatttttaagtatataatttaatggtattaaatactttcatcatgtgcaatcatcagtcaccataactcatcttgtaaaactgaaactctgtacccattaaaacataactctccattccctccaccccctagcccctggcaaggaccactgtcctttctttctctataaatttgagtaagtactttatctaagtgtaatcatacagtatttatccttttgtgactggcttatttcacttagcataatgtcctcaaggttcatctatgttgtaccatgtcagaatttctttcctttcacctgggcagcataccaagaccccatctctaaaagaagtttaaaagaatgtttcaaaggccaggcccagtgactcacgcctgtaatcccgtactttctggggaggatcacttgacaccaggagttcaagaccagcctgggcaacatggcaagacctcttctctaccaaaaaaaaaaattaagaagacattagttaggcattgtgacatgtgcctgtaatcccagcttcccaggaagctgaggcaggagaatggcttgagtccagttcgaggctgaagtgagccatagtcatgccactgcactccatcctgggtaacagaatgagaccttatctcttaaaaaaagtatatctttcctttttatggctgaatgttattccattgtgtataaatgccacattttgcttatccattcatctgtcagtggcacttgagttgcttccgcacctcagctgttgtaaacagtcctgctgtgtatatggccacatataaaaggtcttttaactttattaagctttgttttctcatctgtaaaatggaaaagggcctgctctgcatggttgcagagatgagtgagtgttagtgtgcttgacactcttcctctgaggaaatagcacccgtggttgccagtttgtggctactggagcctcacatggcatttggaggtgtggctcactaccccacccccgcctggggctccaggctaacccaggcaaaactgtaggtgctctctgaccctcagtgtgctccctctcggcccacagcccccggtccctgagaagcggccccctgaaatacagcatttccgcatgagtgatgatgtccactcactgggaaaggtgacctcaggtcagtcccatcccccacccccggtggcttgatgtggtctgttctgaaggtttcggtgataggccccacaccattctctctcttcttccagatctggccaaaaggaggaagctgaactcaggaggtggcctggtaagcagcagaggcagagcctctacccctcgggggctgctctgagggagggtcagaggtggggctgcatcccatcctcagtagaaatgcgcagggtgtcagtggcctcaatttttctgatctttttctagtcggaggagttaggttctgcccggcgttcaggagaagtgaccctgacgaaaggggaccccgggtccctggaggagtgggagacggtggtgggtgatgacttcagtctctactatgattcctactctgtggatgagcgcgtggactccgacagcaaggtgagacagagctggtctgccctccccaccggtgctcccccagggctggggctcactgtccagtcctccttgttccctgtttttctgctttctgtcctttttatcttctgaatatccactaagtcattgccccatgctgtctataactccttttttttgtggggggagacggaatctcattctgtcgcccaggctggagcgcaatatcacgatctgggctcactgcaacctctgtccccagggttaaagcaattctcctgcctcagcctcccgagtagctgggattacaggcacctgccaccacgcccggctaatttttgtatttttagtagagacggggtttccctgtgttggccaggctggtctctaactcctgaccttagttgatccacccaccttggcctcccaaagtgctgggattacagctgtgagccaccgcgcccagctgtaactcattttcaatgtgtattctgcccgtttcatccacaaaggtggccaccaccctgcacatgggatttagtattcttttttttttaatcagctaatgaaatgaccatttaacagacatgtactgtttaaaaaaagaaaacaaaaaaagaaatgaccagaaagcacttttttaaaacatacgttatgctgtttatataaaattcaaaagcattgcattgtcatttatttgcttatttcgttgctctttgtctggttttatcttatatgtttgcctacacagtagaatgtttagtctctctgattttgccttttatttaacattttatcatgaaaacttgcaagcataatcaaaagagtagaatagggagcccccatgtacccaatacacagctccagccattatcagtacacagtccatcttgacccatctgtacatctcccagcacacacacctactaggttattttaaagcaaatcccagacctcatatcattttacctaaacatatatccatatagatttgtaaatataaggcctctttttgtcgttcaacatcattacactactgttttcacacctaaaaaaacttaccgatttcttaataccatcaaatatcctgtcagtcttcacatttcctcagctctcacaaatggtttttgtcaagatccaaatgaggcccacaccttgatttgattaacatttgtcttaggtcagccaggcacagtggctcacgcctgtaatcccaatactttgggaggccaaggcgggcagatcacgtgaggttgggagttcgagaccagcctgatcaacatggagaaaccccgtctctactgaaaaaaatacaaaattagctggacgtagtggtacgtgcctgtaattccagctactcgggaggctgaggcaggagaatcgcttgaacctgggaggtggaggttgcagtgagccaagatcgtaccattgcactccagcctcggcaacaagagcgaaactccgtctcaaaaaaaaaaaaatttttttttgtcttaggtctctctcagtatttaggtttccccatcttctttgtgtttgtttgtttgtttgtttttgttttttgagatggagtctcacactgtcacccaggctggagtgcagtggcgtgatcttggctcactgcaagctccacctcctgagttcaagcaattctcctgcctcagtctcccaagtagctgggattacaggcacccaccaccatgcccagctaattttttgtatttttagtagaggcagggtttcactatgttggccaggctggtctcaaactcctgatctcgtgatctgcccacctcggcctcccaaagcgctgggattacaggcgtgagccaccacacctggcctgatttcctcatcttctaaaaaaaaattttttggcccaggcgtggtggctcacgcctgtaatcccagcactttgggaggcaggtggatcacctgaggtcaggagtttgagaccagcctagccaacatggtgaaaacacatctctaataaaaatacgaaaattagctgggtgtggtggcgggtgcctataatcccagctactcaggaggctgaggcaagagaattgcttgaatccaggaggtggaggttgcagtgagctgagatcacaccattgcaatgcagcctgggcaacaagagcaaaactcaataaataaataagaaagattttttttttttgccatttatttgtcaaagaaaccagctcagttgtcctacagaatttttcacatttaggagttggctgattgggtggagattgacacatcctctctgcccatatttcttgtaaactgatagatctagaggcggaatcagcttcaggtgccaagaagacttgacagtgggtgcaagtgcttctggccacatcacatcaggatgcatggaacatctaatctggtcatttttcttgttagtgataagattgaccagtgggttcaggtgatgtcagcctgaacctttcatataaagtttctcatgagctttgtgtctagtgtttttagcaaccattggtggtcttgcctgtttatgaacatcataaaaggggtatcaaagtatgtttatcttctggtacttgctttttgttttttaacttaatatcacattaccaagatctgtgcacattgctgtctgtaactttttcactgctgtgtaatattccatgcaccctctctttatgtggccctttgtctcctctgctacccacacttatccccagcagccatccgtgggtagtggcggggggcaatggtggtggtggttttctttactcacctcattgtctgagtcctgggggttggatatgtctgttctgcctctctcccagtctgaagttgaagctctaactgaacaactaagtgaagaggaggaggaggaagaggaggaagaagaagaagaggaagaggaggaggaagaggaagaagaagaggaagatgaggagtcagggaatcagtcagatagggtaagagacggaggctgatatctccagaggagtgggagactatggggctggaggtctggtcctgaaggtgttgggggggcccctgggggtgagggttcctaactcctcctcctcccccttcccagagtggttccagtggccggcgcaaggccaagaagaaatggcgaaaagacagcccatgggtgaagccgtctcggaaacggcgcaagcgggagcctccgcgggccaaggagccacgaggtgaggaggctctgctgcttttgggtgccctccagcccccgcccggccccccagagtgtgtgcacgcacacacacgctctcgcatgtccacctgcatgtacccacgcgtccaggcacctgtgagctcgcactctcactctctctgtctctgtgtcaggagtgaatggtgtgggctcctcaggccccagtgagtacatggaggtccctctggggtccctggagctgcccagcgaggggaccctctcccccaaccacgctggtaattgccaattgccgggacagggagccactagggggcgacctcagggcaggagggaaagggaaggaggggaaccacgccagagccggggtgtccatggccaggctttaggggttctggggcatggcggggtggggtagggagggagtgagaggacccgccaggggtcccagtaggtgaggtgcagagcctccctcagctcctcttttcctccatccaaggggtgtccaatgacacatcttcgctggagacagagcgagggtttgaggagttgcccctgtgcagctgccgcatggaggcacccaagattgaccgcatcagcgagagggcggggcacaagtgcatggccactgagagtgtggacggagaggtggggccgtgggctggtgggagaggtgccagggcgtccagtccccggccccagcctcacgctctcttctcacccatcctcactgcgcacagctgtcaggctgcaatgccgccatcctcaagcgggagaccatgaggccatccagccgtgtggccctgatggtgctctgtgagacccaccgcgcccgcatggtcaaacaccactgctgcccgggctgcggctacttctgcacggcggtgagtgaccagtggggcagacaggtagcatgccctgtggcagagggggccccagtaacctgaccatgttgtttccctgctcccagggcaccttcctggagtgccaccctgacttccgtgtggcccaccgcttccacaaggcctgtgtgtctcagctgaatgggatggtcttctgtccccactgtggggaggatgcttctgaagctcaagaggtgaccatcccccggggtgacggggtgaccccaccggccggcactgcagctcctgcacccccacccctgtcccaggatgtccccgggagagcagacacttctcagcccaggtactggcctcccccttctgtactgtctgttccctcccccacccctattgctcctggacatgagctccttcttccacagtgcccggatgcgagggcatggggaaccccggcgcccgccctgcgatcccctggctgacaccattgacagctcagggccctccctgaccctgcccaatgggggctgcctttcagccgtggggctgccactggggccaggccgggaggccctggaaaaggccctggtcatccaggagtcagagaggtgagtggggagttgctcaggcacagcaactggggctgaggccagaggagtggtgtcgaggctgatgctggaatctgaggagctccccttctctccccgctcccgtgctcccttggcaggcggaagaagctccgtttccaccctcggcagttgtacctgtccgtgaagcagggcgagctgcagaaggtgatcctgatgctgtgtgagtgccacccattccttcagcagaccttgaccaagcttcatgtatataccaggcactgggtacagggccaggagtacagtcgtgaaggacacagtccttgccctgaaggacttagtgtggtggggaaaagacacatgtaacccataacgatggggatgtggtgactcataggtgctgggtcctgttctgagtgcttatacctgttagccttggcttgcacagagaggttagggaccttgcacagtgcacagtggtactgagaagcaaggcagggtttgaattcaggcagagctgatgcctttgactccttattctgataaatgctgtggtggaggcaagctcggagaatgccaggaggggccctgatccagcttggggccctgagaagccttcctgaaagaagtgccacctgccccctagcttgcttaccacttgtccctccctctcccggtgtggcgggctctccccgcagtggacaacctggaccccaacttccagagcgaccagcagagcaagcgcacgcccctgcatgcagccgcccagaagggctccgtggagatctgccatgtgctgctgcaggtcagcacgggcccggccccatgcctcattcaccaggcccttaggcccctcccctgccccatgcctccctggtgccagccctcctgccccctcacaggctggagccaacataaatgcagtggacaaacagcagcggacgccactgatggaggccgtggtgaacaaccacctggaggtagcccgttacatggtgcagcgtggtggctgtgtctatagcaaggtgtgcgcgcaggcagcagggcgtggcccccggagtcagggaccaggtttggggtgccagcccaaaggctcatttgcccgtgtctccctcaggaggaggacggttccacctgcctccaccacgcagccaaaatcgggaacttggagatggtcagcctgctgctgagcacaggacaggtggacgtcaatgcccaggtcagcggcccacccagcccagcccctctgggtccctggtgcctgggttccttggcttggcctcaggctttgggccgcctttcctacatctgacctcacactgctcgtgtctgtcctcattgctttcttcttcctcatttgtatttctcttcattcttttctttctcgtttctttctctttatcaagtttcagaataatcagttcctgtcttaatctctgaaagtgtccagtgaggctttttattaactcttgggttgtcatacattggatgtgttttagtcatttattggc

SEQ ID NO: 13987 - DNA, 3913 bp, Rattus norvegicus; identical to SEQ ID NO: 11316
  ref <308>: DATABASE ACCESSION NUMBER: EMBL / X77209
  ref <309>: DATABASE ENTRY DATE: 1997-01-30

SEQ ID NO: 13988 - protein, 641 aa, Rattus norvegicus; identical to SEQ ID NO: 11317
  ref <308>: DATABASE ACCESSION NUMBER: SWISS-Prot / CAA54424
  ref <309>: DATABASE ENTRY DATE: 1996-10-01

SEQ ID NO: 13989 - DNA, 2960 bp, Rattus norvegicus
  ref <308>: DATABASE ACCESSION NUMBER: EMBL / X82152
  ref <309>: DATABASE ENTRY DATE: 1994-12-16
gaggccaaacagaaggacgtggtcactctgaacggttcaacccaagggacaacatgcagtgggcctccatcctgctgctgcgcgggctctgctcgctttcccagggccagtatgaagaagactctcactggtggctccaatacctccgaaaccagcagtccacctactacgacccctacgacacttacccctacgagacctccgacccttacccctatgaagtagaggagggcccagcctatgcctatggtgccccacctccaccagagccccgtgattgtccccaagaatgcgactgtccccccaacttccccacagccatgtactgtgacaaccgcaacctcaagtacctgccctttgtgccctcccgcatgaagtacgtctacttccagaacaaccagatcgctgccatccaggaaggtgtctttgacaatgccaccggcctcctctggattgctctgcatggcaaccagattaccagtgacaagataggcaggaaggtcttctccaagctgaggcacttggagaggctgtacctggaccacaacaacctgacccggatgcccggaccactgcctcggtccctgagagagctccacctggaccacaaccagatctctcgggtccccaacaacgctctggagggcctggagaacctcacagcattatatctccatcacaatgagatccaagaagtgggaagttccatgaggggcctccggtccctgatcctactagacctgagttataaccaccttcgaagggttcccgacggtctgccctcagccctggagcagctgtacctagaacacaacaacgtctacaccgtccctgacagctacttccggggctcacccaagctgctgtatgtccggctgtctcacaacagtctcactaacaatggccttgctaccaacaccttcaattccagcagccttctggagctagacttgtcctacaaccagctgcagaagatccctcccgtcaacaccaacctggagaatctttacctccaaggcaacaggatcaatgagttctccatcagcagtttctgcacggtggtggacgtcatgaacttctccaagctgcaggtgctacgcctggatgggaacgagatcaagcgcagcgctatgccggtggacgccccactctgcctgcgccttgccagcctcatcgagatctgaggggcttcgccttgggctcggggctccgccttggactccgggctccgccttgggatcggagatcggggctcagggctccgggctccgggctccgggcactggactccgggctccaggcatcgggtaccgggcaccggggtcccggcatatgccctgccacctgctacactcagcttgaaggtctggtttggcttttgctggatggtctgggacaagcacgtgacagaagtccacaggatcttattcagtctccttccgataggcaaagttaggtgggatcaggggccaggccagtttctgcaggggatgaaagtggtggtaaaagaaatggccgcagagtctagcccccaaatcttactatccctcaacccttccccatgacctagtctggcagaccatccccttgcttggataatagcatataaccagacaatctgacttcagctgtgctcactcaatggcttggccagttgcttctgcagtcgctctgggctcctactccttgctcctcaaaacatcaaaacgtacttcctgcccagccacttcctctaggcccagctcatcccctctgccctctttcattgaggcctcttctaaggtcttagacaatcaggagacacccacaccccaaggttggtggggagctgtccaacaacctgtggaggaagaccacacattattatctgaggttaaaaggatatctaaaaccatcacacacacacacacacacacacacacacacacacacacacacaacgtcacctgtttaaagtcagcgtattgaacagtataatggtgactgatagtcatgacttaattacaaggggataaccagccctataatggaggatccatcagaggagagaagggtcaaatgctcatttttaggatccacaataagatggggaagagtcacacctcagaatggcaggactgaaggggcagccccccttccagcttcacctgaccaacatgatctgtgccccttcttgggcttttagtatcaaaggggccagtgtggtttccaaaccatgagaaagagcctctgcccatccttggatccaggtatggaggtttgttacacagaggcagaggcagactgtgccagccgtggacccacccactaacccagacaagggtgtgatctccataactggtttgtccctaaagctagagtttaaggtaccagctcttctggagatggtcactggggtacaggaagccctagccaggcccaaggcttacctacactagacatagtttcctctgcttccacactgtgggaccacaccttatactgatggtgcctgtgacgtgtagcttgtctgagagcaaccctgtcttctcctttttaaaggtgatgttgcctaggtacagccatcgggttctctagactcactgggaaagagccacgggtagccagtggcaagaaccagttgtgagatgttagcctgaggtaggtcccttcccagatgccttagacccatgactctgtgtgcacttaggagcaagcttccctgaaaaggacagggtggggtggggtgcttagactgtgccatgggttccagatcctgaaatccacaaaagccaaaccagcttgtttgaaccagggagtgccacatgtggagcaaggctgccctgcccagagctcttgagaagcacctgcatgcagataccatctggcctctataaagggtcctcagcaagaagcaagcatgagtggtggccaacctgaccaataaagttattttataagtgcaaaaaaaaaaaaaaaaa

SEQ ID NO: 13990 - protein, 376 aa, Rattus norvegicus
  ref <308>: DATABASE ACCESSION NUMBER: SWISS-Prot / CAA57648
  ref <309>: DATABASE ENTRY DATE: 2002-06-15
MQWASILLLRGLCSLSQGQYEEDSHWWLQYLRNQQSTYYDPYDTYPYETSDPYPYEVEEGPAYAYGAPPPPEPRDCPQECDCPPNFPTAMYCDNRNLKYLPFVPSRMKYVYFQNNQIAAIQEGVFDNATGLLWIALHGNQITSDKIGRKVFSKLRHLERLYLDHNNLTRMPGPLPRSLRELHLDHNQISRVPNNALEGLENLTALYLHHNEIQEVGSSMRGLRSLILLDLSYNHLRRVPDGLPSALEQLYLEHNNVYTVPDSYFRGSPKLLYVRLSHNSLTNNGLATNTFNSSSLLELDLSYNQLQKIPPVNTNLENLYLQGNRINEFSISSFCTVVDVMNFSKLQVLRLDGNEIKRSAMPVDAPLCLRLASLIEI

SEQ ID NO: 13991 - DNA, 2852 bp, Homo sapiens
agacaaaatgcagtggacctccctcctgctgctggcagggctcttctccctctcccaggcccagtatgaagatgaccctcattggtggttccactacctccgcagccagcagtccacctactacgatccctatgacccttacccgtatgagacctacgagccttacccctatggggtggatgaagggccagcctacacctacggctctccatcccctccagatccccgcgactgcccccaggagtgcgactgcccacccaacttccccacggccatgtactgtgacaatcgcaacctcaagtacctgcccttcgttccctcccgcatgaagtatgtgtacttccagaacaaccagatcacctccatccaggaaggcgtctttgacaatgccacagggctgctctggattgctctccacggcaaccagatcaccagtgataaggtgggcaggaaggtcttctccaagctgaggcacctggagaggctgtacctggaccacaacaacctgacccggatgcccggtcccctgcctcgatccctgagagagctccatctcgaccacaaccagatctcacgggtccccaacaatgctctggaggggctggagaacctcacggccttgtacctccaacacaatgagatccaggaagtgggcagttccatgaggggcctccggtcactgatcttgctggacctgagttataaccaccttcggaaggtgcctgatgggctgccctcagctcttgagcagctgtacatggagcacaacaatgtctacaccgtccccgatagctacttccggggggcgcccaagctgctgtatgtgcggctgtcccacaacagtctaaccaacaatggcctggcctccaacaccttcaattccagcagcctccttgagctagacctctcctacaaccagctgcagaagatccccccagtcaacaccaacctggagaacctctacctccaaggcaataggatcaatgagttctccatcagcagcttctgcaccgtggtggacgtcgtgaacttctccaagctgcaggtgctgcgcctggacgggaacgagatcaagcgcagcgccatgcctgccgacgcgcccctctgcctgcgccttgccagcctcatcgagatctgagcagccctggcaccgggtactgggcggagagcccccgtggcatttggcttgatggtttggtttggcttttgctggaaggtccaggatggaccatgtgacagaagtccacgggcaccctctgtagtcttctttcctgtaggtggggttagggggggcgatcagggacaggcagccttctgctgaggacataggcagaagctcactcttttccagggacagaagtggtggtagatggaaggatccctggatgttccaaccccataaatctcacggctcttaagttcttcccaatgatctgaggtcatggaacttcaaaagtggcatgggcaatagtatataaccatacttttctaacaatccctggctgtctgtgagcagcacttgacagctctccctctgtgctgggctggtcgtgcagttactctgggctcccatttgttgcttctcaaaatatacctcttgcccagctgcctcttctgaaatccacttcacccactccactttcctccacagatgcctcttctgtgccttaagcagagtcaggagaccccaaggcatgtgagcatctgcccagcaacctgtggagacaacccacactgtgtctgagggtgaaaggacaccaggagtcacttctatacctccctaacctcacccctggaaagccaccagattggaggtcaccagcatgatgataatattcatgacctgatgtgggaggagacagccaacctcaggcttagatcaatgtatagggctatattttggcagctgggtagctctttgaaggtggataagacttcagaagaggaaaggccagactttgcttaccatcagcatctgcaatgggccaaacacacctcaaattggctgagttgagaaagcagccccagtagttccattcttgcccagcactttctgcattccaaacagcatcctacctgggtttttatccacaaaggtagcggccacatggtttttaaagtatgagaaacacagtttgtcctctccttttatccaagcaggaagattctatatcctgatggtagagacagactccaggcagccctggacttgctagcccaaagaaggaggatgtggttaatctgtttcacctggtttgtcctaaggccatagttaaaaagtaccagctctggctggggtccgtgaagcccaggccaggcagccaaatcttgcctgtgctgggcatacaaccctctgctttcacatctctgagctatatcctcattagtgaaggtggcttttgctttatagtttggctggggagcacttaattcttcccatttcaaaaggtaatgttgcctggggcttaacccacctgccctttgggcaaggttgggacaaagccatctgggcagtcaggggcaaggactgttggaggagagttagcccaagtataggctctgcccagatgccatcacatccctgatactgtgtatgctttgaagcaccttccctgagaagggaagaggggatctttggactacgttcttggctccagacctggaatccacaaaagccaaaccagctcatttcaacaaaggagctccgatgtgaggggcaaggctgccccctgccccagggctcttcagaaagcatctgcatgtgaacaccatcatgcctttataaaggatccttattacaggaaaagcatgagtggtggctaacctgaccaataaagttattttatgattgc

SEQ ID NO: 13992 - protein, 376 aa, Homo sapiens
MQWTSLLLLAGLFSLSQAQYEDDPHWWFHYLRSQQSTYYDPYDPYPYETYEPYPYGVDEGPAYTYGSPSPPDPRDCPQECDCPPNFPTAMYCDNRNLKYLPFVPSRMKYVYFQNNQITSIQEGVFDNATGLLWIALHGNQITSDKVGRKVFSKLRHLERLYLDHNNLTRMPGPLPRSLRELHLDHNQISRVPNNALEGLENLTALYLQHNEIQEVGSSMRGLRSLILLDLSYNHLRKVPDGLPSALEQLYMEHNNVYTVPDSYFRGAPKLLYVRLSHNSLTNNGLASNTFNSSSLLELDLSYNQLQKIPPVNTNLENLYLQGNRINEFSISSFCTVVDVVNFSKLQVLRLDGNEIKRSAMPADAPLCLRLASLIEI

SEQ ID NO: 13993 - DNA, 1647 bp, Rattus norvegicus
  ref <308>: DATABASE ACCESSION NUMBER: EMBL / X83399
  ref <309>: DATABASE ENTRY DATE: 1996-03-29
cctctcgcccccccttcaggagcggttgtgcgatcagatcgatctaagatggcgactgtggaaccggaaaccacccctaccactaatcccccacctgcggaagaggaaaaaacagagtctaatcaggaggttgctaatccagagcactatattaaacaccctctacagaacaggtgggcactctggttttttaaaaatgataaaagcaaaacttggcaagcaaaccttcggttgatctctaagtttgatactgttgaagacttttgggctctatacaaccatatccagttgtctagtaatttaatgcctggctgtgactactcactttttaaggatggtattgagcctatgtgggaagatgagaaaaacaaacggggaggacgatggctaattacattgaacaagcagcagagacgaagtgacctcgatcgcttttggctagagacactgctgtgccttattggagaatcttttgatgactacagtgatgacgtgtgtggagctgttgtcaatgttagagctaaaggtgataagatagcaatatggacgactgaatgtgaaaacagagatgcagtcacacacatagggagggtatacaaggaaaggttaggacttcctccgaagatagtgattggttatcagtcccacgcagacacagctacaaagagcggctccaccactaaaaataggtttgttgtttaagaagacaccttctgagtatcctcacaggagactgcgtcacgcaatcgagattgggagctgaaccaaagcctcatcaaagcagagtggactgcactgaagctgactccatccaagtgttgctaagatataagagaagtctcattcgcctttgtcttgtacttctgtgttcattctcctccccaccccaatttttgctagtgtgtccacatcccaatcaaagaattacagtatacgtcaccccagaacccacagatgtgttcctggcccgctctgtaacagccgggtagagttaccacgacacacacttgcctttccacagtattcgaaaaagaacgtgcatttctgtcaccttagcaggaaaagatctggttttgttccactccatgcaggagcggatttgctggtgtgagagtctaagtacagctttctagcaaccttctgttttctgtcacagcattgtccttgctgtcctcttgctgatggctgctagatgttaatttatttgcttccctccttgataacattagtgattctgatttcaggtttttcatttgtttggcttttgtttttttcctcatgtaacattggtgaaggatccaggactatgacagaaaggtggaataaacattacatttgtgcattctttggtaagtttttttgttttttgtaactacaaagctttgctacaaatttatgcatttcattcaaatcagtgatctatgctgtgtgatccctaaacataattgtggactataaaaatgtaacaccataattacattcctaactagaattagttgtctgcttttgtatctttatgctgtactttaacactttgtattacttaggttattttgctttggttacaatggctcaagtagaaaagcggtcccatccatattaagacagtgtacaaaactgtaaataaaatgtgtacagtgaattgtc

SEQ ID NO: 13994 - protein, 217 aa, Rattus norvegicus
  ref <308>: DATABASE ACCESSION NUMBER: SWISS-Prot / CAA58316
  ref <309>: DATABASE ENTRY DATE: 2000-05-30
MATVEPETTPTTNPPPAEEEKTESNQEVANPEHYIKHPLQNRWALWFFKNDKSKTWQANLRLISKFDTVEDFWALYNHIQLSSNLMPGCDYSLFKDGIEPMWEDEKNKRGGRWLITLNKQQRRSDLDRFWLETLLCLIGESFDDYSDDVCGAVVNVRAKGDKIAIWTTECENRDAVTHIGRVYKERLGLPPKIVIGYQSHADTATKSGSTTKNRFVV

SEQ ID NO: 13995 - DNA, 1842 bp, Homo sapiens
  ref <308>: DATABASE ACCESSION NUMBER: Refseq / NM_001968
  ref <309>: DATABASE ENTRY DATE: 2000-10-31
cgatcagatcgatctaagatggcgactgtcgaaccggaaaccacccctactcctaatcccccgactacagaagaggagaaaacggaatctaatcaggaggttgctaacccagaacactatattaaacatcccctacagaacagatgggcactctggttttttaaaaatgataaaagcaaaacttggcaagcaaacctgcggctgatctccaagtttgatactgttgaagacttttgggctctgtacaaccatatccagttgtctagtaatttaatgcctggctgtgactactcactttttaaggatggtattgagcctatgtgggaagatgagaaaaacaaacggggaggacgatggctaattacattgaacaaacagcagagacgaagtgacctcgatcgcttttggctagagacacttctgtgccttattggagaatcttttgatgactacagtgatgatgtatgtggcgctgttgttaatgttagagctaaaggtgataagatagcaatatggactactgaatgtgaaaacagagaagctgttacacatatagggagggtatacaaggaaaggttaggacttcctccaaagatagtgattggttatcagtcccacgcagacacagctactaagagcggctccaccactaaaaataggtttgttgtttaagaagacaccttctgagtattctcataggagactgcgtcaagcaatcgagatttgggagctgaaccaaagcctcttcaaaaagcagagtggactgcatttaaatttgatttccatcttaatgttactcagatataagagaagtctcattcgcctttgtcttgtacttctgtgttcattttttttttttttttttggctagagtttccactatcccaatcaaagaattacagtacacatccccagaatccataaatgtgttcctggcccactctgtaatagttcagtagaattaccattaattacatacagattttacctatccacaatagtcagaaaacaacttggcatttctatactttacaggaaaaaaaattctgttgttccattttatgcagaagcatattttgctggtttgaaagattatgatgcatacagttttctagcaattttctttgtttctttttacagcattgtctttgctgtactcttgctgatggctgctagattttaatttatttgtttccctacttgataatattagtgattctgatttcagtttttcatttgttttgcttaaattttttttttttttttcctcatgtaacattggtgaaggatccaggaatatgacacaaaggtggaataaacattaattttgtgcattctttggtaattttttttgttttttgtaactacaaagctttgctacaaatttatgcatttcattcaaatcagtgatctatgtttgtgtgatttcctaaacataattgtggattataaaaaatgtaacatcataattacattcctaactagaattagtatgtctgtttttgtatctttatgctgtattttaacactttgtattacttaggttattttgctttggttaaaaatggctcaagtagaaaagcagtcccattcatattaagacagtgtacaaaactgtaaataaaatgtgtacagtgaattgtcttttagacaactagatttgtccttttatttctccatctttatagaaggaatttgtacttcttattgcaggcaagtctctatattatgtcctcttttgtggtgtcttccatgtgaacagcataagtttggagcactagtttgattattatgtttattacaatttttaataaattgaataggtagtatcatatatatgga

SEQ ID NO: 13996 - protein, 217 aa, Homo sapiens [sequence omitted]

SEQ ID NO: 13997 - DNA, 1596 bp, Rattus norvegicus
  ref <308>: DATABASE ACCESSION NUMBER: EMBL / X94185
  ref <309>: DATABASE ENTRY DATE: 1996-03-08
aaaactgggcactttcattcagagagattcattgactctgagagtgatctggtgcagagggaccaccggcttggcttctgtcgccttccctaaccgctagcttcggcttgggaaaggccgaatcaaacccggctccgagagccgagcttctcacggcgtgcttggcctatgcctgcctcgaggggcgtctgctaggcaccccgccttctcctgcagctcgacccccatgatagatacgctcagacccgtgcccttcgcgtcggaaatggcgatcagcaagacggtggcgtggctcaacgagcagctggagctgggcaacgaacagctgctgctgatggactgccgaccgcaggagctttacgagtcgtcgcacatcgaatctgccatcaacgtggccatcccgggcatcatgctgcggcgtctgcagaagggcaacctgccggtgcgcgcgctattcacgcgctgcgaggaccgggaccgctttaccaggcgctgcggcaccgacaccgtggtgctctacgacgagaacagcagcgactggaatgagaacacaggtggagagtcggtcctcgggctgctgctcaagaaactcaaagacgagggctgccgggcgttctaccttgaaggtggcttcagtaagttccaggccgagttcgccctgcactgcgagaccaatctagacggctcgtgcagcagcagctccccgcccttgccagtgctgggactcgggggcctgaggatcagctccgactcttcctcggacattgagtctgaccttgaccgagaccccaatagtgcaacggactccgatggcagcccgctgtccaacagccagccttccttcccggtggagattttgcccttcctttacctgggctgtgccaaggactctactaacttggacgtgttggaagagtttggcatcaagtacatcttgaacgtcacccccaatctgcccaatctgtttgagaatgcaggggagttcaagtacaagcaaattcctatctctgatcactggagccaaaacctgtcccagtttttccctgaggccatttctttcatagatgaagcccgaggcaaaaactgtggtgtcctggtgcattgcttggcgggcatcagccgctccgtcacggtgacagtggcttaccttatgcagaagctcaacttgtccatgaacgatgcttatgacattgtcaaaatgaagaagtccaacatctctcccaacttcaacttcatgggccagctgcttgactttgaaaggaccctgggactcagcagcccctgtgacaatcgtgtccccgcacagcagctctacttcaccgcgccctccaaccagaatgtctaccaagtggactccctgcaatctacgtgaaaggcacccacctttcctagccgggagtgtctcattccttcagtttctcttgggcagcatcgaccaggctgctttctttgtgtgtggccccaggtgtcaaaaatgtcaccagctgtctgtattagacaaggttgccaagtgcaaaattggttattacggagggagagatttgctccattcattgttttttgggaaggacaggggtatgctgtctagatcccagg

SEQ ID NO: 13998 - protein, 381 aa, Rattus norvegicus; identical to SEQ ID NO: 8556
  ref <308>: DATABASE ACCESSION NUMBER: SWISS-Prot / CAA63895
  ref <309>: DATABASE ENTRY DATE: 2002-06-15

SEQ ID NO: 13999 - DNA, 463 bp, Rattus norvegicus; identical to SEQ ID NO: 10189
  ref <308>: DATABASE ACCESSION NUMBER: EMBL / X95850
  ref <309>: DATABASE ENTRY DATE: 1996-08-17

SEQ ID NO: 14000 - DNA, 557 bp, Rattus norvegicus; identical to SEQ ID NO: 10210
  ref <308>: DATABASE ACCESSION NUMBER: EMBL / X97374
  ref <309>: DATABASE ENTRY DATE: 1996-09-10

SEQ ID NO: 14001 - protein, 181 aa, Rattus norvegicus; identical to SEQ ID NO: 10211
  ref <308>: DATABASE ACCESSION NUMBER: SWISS-Prot / CAA66043
  ref <309>: DATABASE ENTRY DATE: 2002-06-15

SEQ ID NO: 14002 - DNA, 1198 bp, Homo sapiens; identical to SEQ ID NO: 10212
  misc_feature (1)..(1198): n=a, c, g or t
  ref <308>: DATABASE ACCESSION NUMBER: Refseq / NM_006228
  ref <309>: DATABASE ENTRY DATE: 2000-11-03

SEQ ID NO: 14003 - protein, 176 aa, Homo sapiens; identical to SEQ ID NO: 10213
  ref <308>: DATABASE ACCESSION NUMBER: Refseq / NP_006219
  ref <309>: DATABASE ENTRY DATE: 2000-11-03

SEQ ID NO: 14004 - DNA, 706 bp, Rattus norvegicus
  ref <308>: DATABASE ACCESSION NUMBER: EMBL / X97443
  ref <309>: DATABASE ENTRY DATE: 1996-08-16
gccttgctctttctgttccttctcggccccagctcggtcctcggcatctccttccatctacccgtgaactctcgcaagtgtctccgcgaggagatccacaaagacttgctggttacgggcgcgtacgagatcaccgaccagtctgggggcgctggcggcctgcgcacccacctcaagatcacagattctgctggccatattctgtatgccaaagaggatgcaactaaagggaagtttgcctttaccacagaagactatgacatgtttgaagtatgctttgagagcaagggaacagggcggatacctgaccaactagtgattctagacatgaagcatggagtagaggcgaaaaattatgaagagatcgcaaaagttgagaaactcaaaccactggaggtggagctacggcgcctcgaggacctttcagagtctattgttaacgactttgcctacatgaagaagcgggaagaggagatgagggacaccaacgagtccacaaacacccgcgtcctgtacttcagcatcttttccatgttctgcctcattggactagccacctggcaggtcttctacctgcgtcgcttcttcaaggccaagaagttgatagagtaatgaggctcagtcttctgtcccctggagccagcagaacatcgctgggacgttgcctggcctagcccaaggccaagttactacgtatatcaaggcg

SEQ ID NO: 14005 - protein, 219 aa, Rattus norvegicus
  ref <308>: DATABASE ACCESSION NUMBER: SWISS-Prot / CAA06212
  ref <309>: DATABASE ENTRY DATE: 2001-06-01
MSGLSGPLSWPGPLLSALLFLFLLGPSSVLGISFHLPVNSRKCLREEIHKDLLVTGAYEITDQSGGAGGLRTHLKITDSAGHILYAKEDATKGKFAFTTEDYDMFEVCFESKGTGRIPDQLVILDMKHGVEAKNYEEIAKVEKLKPLEVELRRLEDLSESIVNDFAYMKKREEEMRDTNESTNTRVLYFSIFSMFCLIGLATWQVFYLRRFFKAKKLIE

SEQ ID NO: 14006 - DNA, 690 bp, Homo sapiens; identical to SEQ ID NO: 1366
  ref <308>: DATABASE ACCESSION NUMBER: EMBL / X97442
  ref <309>: DATABASE ENTRY DATE: 1996-08-16

SEQ ID NO: 14007 - protein, 219 aa, Homo sapiens; identical to SEQ ID NO: 1367
  ref <308>: DATABASE ACCESSION NUMBER: SWISS-Prot / P49755
  ref <309>: DATABASE ENTRY DATE: 2002-06-15

SEQ ID NO: 14008 - DNA, 706 bp, Rattus norvegicus; identical to SEQ ID NO: 14004
  ref <308>: DATABASE ACCESSION NUMBER: EMBL / X97443
  ref <309>: DATABASE ENTRY DATE: 1996-08-16

SEQ ID NO: 14009 - protein, 219 aa, Rattus norvegicus; identical to SEQ ID NO: 14005
  ref <308>: DATABASE ACCESSION NUMBER: SWISS-Prot / CAA06212
  ref <309>: DATABASE ENTRY DATE: 2001-06-01

SEQ ID NO: 14010 - DNA, 690 bp, Homo sapiens; identical to SEQ ID NO: 1366
  ref <308>: DATABASE ACCESSION NUMBER: EMBL / X97442
  ref <309>: DATABASE ENTRY DATE: 1996-08-16

SEQ ID NO: 14011 - protein, 219 aa, Homo sapiens; identical to SEQ ID NO: 1367
  ref <308>: DATABASE ACCESSION NUMBER: SWISS-Prot / P49755
  ref <309>: DATABASE ENTRY DATE: 2002-06-15

SEQ ID NO: 14012 - DNA, 650 bp, Rattus norvegicus
  ref <308>: DATABASE ACCESSION NUMBER: EMBL / Y00404
  ref <309>: DATABASE ENTRY DATE: 1993-09-12
gttttgcaccttcgtttcctgcggcggcttctgtcgtctccttgctttttgctctcccaggttccgaggccgccgcgcgtctcccggggaagcatggcgatgaaggccgtgtgcgtgctgaagggcgacggtccggtgcagggcgtcattcacttcgagcagaaggcaagcggtgaaccagttgtggtgtcaggacagattacaggattaactgaaggcgagcatgggttccatgtccatcaatatggggacaatacacaaggctgtaccactgcaggacctcattttaatcctcactctaagaaacatggcggtccagcggatgaagagaggcatgttggagacctgggcaatgtggctgctggaaaggacggtgtggccaatgtgtccattgaagatcgtgtgatctcactctcaggagagcattccatcattggccgtactatggtggtccacgagaaacaagatgacttgggcaaaggtggaaatgaagaaagtacaaagactggaaatgctggaagccgcttggcttgtggtgtgattgggattgcccaataaacattccctatgtggtctgagtctcagactcatctgctgtcctgctaaactgtagaaaaaaaccaaaccattaaactgtaatcttaacagtt

SEQ ID NO: 14013 - protein, 153 aa, Rattus norvegicus
  ref <308>: DATABASE ACCESSION NUMBER: SWISS-Prot / CAA68465
  ref <309>: DATABASE ENTRY DATE: 2002-06-15
AMKAVCVLKGDGPVQGVIHFEQKASGEPVVVSGQITGLTEGEHGFHVHQYGDNTQGCTTAGPHFNPHSKKHGGPADEERHVGDLGNVAAGKDGVANVSIEDRVISLSGEHSIIGRTMVVHEKQDDLGKGGNEESTKTGNAGSRLACGVIGIAQ

SEQ ID NO: 14014 - DNA, 560 bp, Homo sapiens
  ref <308>: DATABASE ACCESSION NUMBER: Refseq / NM_000454
  ref <309>: DATABASE ENTRY DATE: 2002-11-05
atggcgacgaaggccgtgtgcgtgctgaagggcgacggcccagtgcagggcatcatcaatttcgagcagaaggaaagtaatggaccagtgaaggtgtggggaagcattaaaggactgactgaaggcctgcatggattccatgttcatgagtttggagataatacggcaggctgtaccagtgcaggtcctcactttaatcctctatccagaaaacacggtgggccaaaggatgaagagaggcatgttggagacttgggcaatgtgactgctgacaaagatggtgtggccgatgtgtctattgaagattctgtgatctcactctcaggagaccattgcatcattggccgcacactggtggtccatgaaaaagcagatgacttgggcaaaggtggaaatgaagaaagtacaaagacaggaaacgctggaagtcgtttggcttgtggtgtaattgggatcgcccaataaacattcccttggatgtagtctgaggccccttaactcatctgttatcctgctagctgtagaaatgtatcctgataaacattaaacactgtaatctt

SEQ ID NO: 14015 - protein, 154 aa, Homo sapiens [sequence omitted]

SEQ ID NO: 14016 - DNA, 6188 bp, Rattus norvegicus
  ref <308>: DATABASE ACCESSION NUMBER: EMBL / Z15123
  ref <309>: DATABASE ENTRY DATE: 1993-06-17
ggctggctttggagccctagctgctctcaaatttatcctctttgttttagtgtccttagtgctaagactagagctgtgaaccaccattgccaccctagcatagatttgataaggactccaccatccttgtgagaaagttaagcattggcacttgattgtgctgctgactgttgagaacacttgccatgcaagtttgtcatcgatttatccccagagcccaccaaaggagggagaggtgactccacatttgtcctctgatctccacatatacacatggtacacatacatgcacaatatattgatctatgttgtcccatagctttggtcaatatacagaaaccagtcctccaagctggatttggtggctgcacacttgcgatcccagctttggtttggggctgctagagcaggaggaacaaactggtctccacaatgagaccctgcttgcttgcttgcttgttaatttgtatgagtcttgcctataacatatatgtgtgccctagtgctcatgaggacagaatagggcatcagatccctggggctacagttagagtggcttttgagtctccatgagtgctgggaaacaaactttaatcttaaagatctttctctcttttttaagagcttcttttattctcgtaagaatttcatgaagccttctcaccaagggtacccacaccggaatttccaggaagaaatcgagtttcttaatgcaattttcccaagtaagtaaacctagagtataatgactcttgccgtttagagctgggtgggtattttgtgtttgtttctaagatgggtttcatgatagcccgtgctggtctggatctgacctggaacaccgggagttgtttacactgcttgatgctgcggggttcattttatttatgttctgcttacctggatgttataaagacttcagacatgttagttgtgtgggtaaaacagtacagttgtattatgcacgtgtgaaaataatgtggccagagtgagtttgtggcaagtgaggcagtagggcatgcaccgtactcatggtgactaagtagactgcagggatgcttgaggttaaacattcagggccagagtggaccagatagtgagaacgtgtttcaaaaacagtcggccggggagatagctcaaggagttgtaagtgaacttgcttcacaaggacccaaatctgatccccgtacctacatttaaaataaaagcaaaggcgccaggtactggggctggaggggtttaatgctggagctagggaggcagagactggatccccatggcccataacccggcctgttctgcagacttagatatgtacagctcacaaatagtggtgagtacacgtgtagcatgcatgaggccctgaattgatcttcaacactacaagaaagaaataagacttgagacacttgcctgtaagttatgatatcagacgctacgtgctgccagaggggtggatcttaacttagcgccatttccaagttggtttactgggctaagggaaatctggaaaccgtttgggaagaatatgtaagtaaaacagctaagaaaagtgccctgtggatttttaggaagaaggtaagcattctacaaggtcaccagcatcagtggcagccagataaaatgcctccacagcaaaggggaggtgtagagtgatttagaaaggacctagacttgattgctggtaccagcgtggtaatggatctgctgcctctgatgtgcgggcatagaatacccatgtagcccctgtaaactcattcatggaaacaagacagcaacgcagatgtttttcctgttgggactcactctaatttcccgtcactggtgctattaagtgatttgtttttaagaaaaatcctctttcctcacagacggagcagcatattgtatgggacgtatgaattctgactgttggtatgtggttttagtttggctttgttgcctttgtatgtgggggtggggttagccgagaagggtgttctaagctagacctagtaacctaccccagttaatcctagctattctggaggctgaggcaagagggacaagaccaataaagtcaacttagggcaataaaataaaaagaaaagatgagaggtctatctcagtggtacaatgtacttagcctgtgtgtggccctgggattgtcctttaatactgtaaatgtgtttttaagcacagttggaaattttgttgtgggaggcagtttcactgtgtcgcttgctggccttgaattctgctctgtagaccagtgtcggtgtctttgcctgcgtcctgagagatggaattaaaggatgctagcatgtctgttgaagttgttgtgcaagatttgtttgtctgatcattcatctcctacccataacttccctggtctgcacctggtctccttaacctgtcgtttaaagttttagccaagcatcggtggtgcaagcctttaatcttgcactgcactcggatgcaagggcaggtagatctcttaggtttgagatcaacctggtctacagagtgagttccaggacagccatagctacaatgaagccctgcctagaaataatacatgttcattgctcacatctactcatgcagttacggcttcatccatcagccgccttagatagatagaacgcttacagaaaactgacttcagaggccgccagtctttcctgaagattgggagctcaggaagcaccccctttcgctacaggcggatgtcatgcaggcaactgcagctgctataaggctttaaaatatgggtgggcattatgaagagggggcatgggcttttttgggttttgttttttatgactcagtttctatgtaaactgtcagctctgaagtaaaacctgctttacttgtacataggtacctgtacactttggatctcccagagagccgagtaatcaatcagccagatcaaaccctggaaattctgatgagtgagcttgacccagcagttatggaccagttctacatgaaagatggtgttactgcaaaggatgtcactcgtgagagtggaattcgtgacctgataccaggttctgtcattgatgccacactgttcaatccttgtggctactcaatgaatggaatgaaatcggatgtgagtggctcgcagtctgaataaatttttgtgtcttctcctgtctgtcagtaacagcctttgtttgatattaacttactgttaataacttttctctaagggaacatattggactattcacatcactccagaaccagaattttcttatgttagctttgaaacaaacctaagtcagacctcctatgatgacctgatcaggaaagttgtggaagtcttcaagccaggaaaatttgtgaccaccttgtttgttaatcaggtaccttgacctctgttttatttttttcctttttgggtattcagtgtcttatatatgctaggcaactagtgtggttgttacaaggtgacctatcttaccactgtgtgtcacagggccactccctgtgctgcctggcagtggtggctcattaggtttttagcagtcctgttctgtatggatctccttttaatgagctcctgctccgctgatctccctgttgacaaccctgcttcccagcccaaatggagataaacaaacaaactgccacgccttggggtaggagagagatcagtagctaaggcacccggattcatctcagcatccattgcaggaggctcacaatgagaattgcatgcccactttgcaggggcacgtacacacaaacacacactcttttataatgcacagttaagacgcaccagaagggaacatcagatcccattacagatggttgtgacgaccatgtggctgctgagatttgaactcaggacctctggaagggcagtcagtgctcttaactgctgaaccatctctccagcccaaaatgcagtttaagatacatctattcgtggcattactgttttgtctggaaatatgctggtggtcagaagtactaatgcttgtttctttttcccagagttctaagtgtcgcacagtgctttcttcgccccagaagattgacggtttcaaacgtcttgattgccagagcgctatgttcaacgattacaattttgtttttaccagttttgctaagaaacagcaacaacagagttgattaggaaaaatgaaaaagaaaaaacgcaaaaagagaagacacacaggaggtggtggctgctttctagatgttgatcctgggggccatgctgaccgtgaccaccaccttgtagctgcagaaagccctaggtgtaatgatagtgtaatcattttgaagtgtatgcattattatatcaaggagttagatatcttgcatgaatgctctcttctgtgtttaggtgttctatgccactcttgctgtggaactgaagtgcatgtagaaaagaactctgactgtatgaatctttacgacacttgtgaaaacgattcgacttggtttatgcacagcgtaatatttctgcaggcatcgtccaaaatcccccacagacaaggctttcgtccccattagatgcggcctcagctgaccattggcgactgttctatttgctgccagagtttttacatccagttacctccactttctagagcatattctctactaatgttcaaaaccgatttctacttcatacaggtgtcttatgcaatggcaattaaagttttcttccacaagttgagtctttgtaaggaaatgattccagttgcttgttttgtgttctactgttttagtaattgctcctgcatttatagtcctatggttttttcactacccctgatgaagcaatacacggtcacactgtgggcttacattgtaatcttcaccccagatgggagctcagagacggtcccttgctcatttttccctaagatgtagaatgtggccttgctattggcatgcccttctgtggaagataaatgatggaagtgaaagtatcccgggggtgagcaaggagaaccaacccatggcagtgatgggctgtgcagtgcactccgagctctcacagtggagtgcccaccatgccttcactaactcactgagcagtgatagggatgcccaccaagtcagagcagaaatctaaccctaaggattctcacctcggtaagtgccgccattgccaccactttactaaaggaagtttccgctcagaggagagtctgtacttcccgcctgtcctaatgtcagctgttctctctggtctttcaccatggcgttcagatgctcaaatgaatggctgatcggccgcagggaggactctccgggttactgggcctggagaatggagaaacagcacggtattctgacagttaatggcaccagagatgcgggctttcaagagctggcctgttagtggcatttttaagcagaaaagagcaaactagacgaagttccctatttattgccctcccactgtttccttggcagtttctggactggcgcaatgatgccttgttccttccgtatttataacgaacgctaaaaagcgtttctaagcatggagtctacttggtttgaaatcaagtggttggaacactgtctggatttttactttacgcagtgttgattgaacgcttcgttggggaagccttcagtccgcttcatcggtctgttctgtaatgagcacagcacacctagtttgaattgctgtttggagggccagtgcttatttgagctgggtcttgtaacccagtagattttggcttgaggtctgactcccccatcttacgaaattaagaattcttaatgttggaaattgcatagggtttgcgtggaaaaaagcccagggaaaaaaaaaaaaaacagaaggcggactagtgatctagtgtgattacaggcggggaagttttggtgccataatttctttgttggtgttggacttttaatcagctgaaatgtatttctgtaccacaatgtaagcttcaataaaagtttgcttaattgtctagtaacatccagaaagttttctgtttggtgtctgcttaaccaaaacacggaggatttcaaacatttgacggtaggagtgacaaccttaattaagctcagtagggctgcatatacaatgttctattgaagtttggcaagcatcagctcttggtcattttaaagtgtctagtaagctgaaagtaggcaaagatactttgattttgatgagatgggcttatgttagagatagttgctggttt

SEQ ID NO: 14017 - protein, 333 aa, Rattus norvegicus; identical to SEQ ID NO: 6478
  ref <308>: DATABASE ACCESSION NUMBER: SWISS-Prot / AAA42105
  ref <309>: DATABASE ENTRY DATE: 2001-10-16

SEQ ID NO: 14018 - DNA, 1686 bp, Homo sapiens; identical to SEQ ID NO: 6479
  ref <308>: DATABASE ACCESSION NUMBER: EMBL / BC000171
  ref <309>: DATABASE ENTRY DATE: 2001-07-13

SEQ ID NO: 14019 - protein, 334 aa, Homo sapiens; identical to SEQ ID NO: 6480
  ref <308>: DATABASE ACCESSION NUMBER: SWISS-Prot / AAH00171
  ref <309>: DATABASE ENTRY DATE: 2002-06-15

SEQ ID NO: 14020 - DNA, 6188 bp, Rattus norvegicus; identical to SEQ ID NO: 14016
  ref <308>: DATABASE ACCESSION NUMBER: EMBL / Z15123
  ref <309>: DATABASE ENTRY DATE: 1993-06-17

SEQ ID NO: 14021 - protein, 333 aa, Rattus norvegicus; identical to SEQ ID NO: 6478
  ref <308>: DATABASE ACCESSION NUMBER: SWISS-Prot / AAA42105
  ref <309>: DATABASE ENTRY DATE: 2001-10-16

SEQ ID NO: 14022 - DNA, 1686 bp, Homo sapiens; identical to SEQ ID NO: 6479
  ref <308>: DATABASE ACCESSION NUMBER: EMBL / BC000171
  ref <309>: DATABASE ENTRY DATE: 2001-07-13

SEQ ID NO: 14023 - protein, 334 aa, Homo sapiens; identical to SEQ ID NO: 6480
  ref <308>: DATABASE ACCESSION NUMBER: SWISS-Prot / AAH00171
  ref <309>: DATABASE ENTRY DATE: 2002-06-15

SEQ ID NO: 14024 - DNA, 2428 bp, Rattus norvegicus
  ref <308>: DATABASE ACCESSION NUMBER: EMBL / Z17319
  ref <309>: DATABASE ENTRY DATE: 1994-11-08
agttggtacctagatggtgggggagttgcaggtaccactaatctattttcttttgatccaaggtgatctcagcttggaggggatgaaactggtttgaagacaactcagactcaacaagggaaccaggaggaaggttttttgatcgttctggaaaccactccaaggtgtaaggggtgtgtgtgtgtgtgtgtgtgtgtgtgtgtgtgtgtgtgccatgtttctgctgtctggtgctgttcaccacaaggccggacctctccccaaagccatggcctggtacccactccattttctaccatgactttttctcctctgtctaccaaagggccttcctagtgtggctacctatgggaggcaggagagggccctgtgagggaggcaggtggtcaggggcttgaagagggcctccaacctaaaaagttctctactaagttgagcacggcaatgccaattagtggggtgggggtgggagtatcctcgtggtaaaagcgtgtgctccttccctgtttaaccaaccccagtcaacacagacaatgcatggatactgagacaggcacctgggcagggaatagtcatctgttgcagacacacctatttatttatgcatgcactgacctctttgtgtacacacacacacacacacacacacacacctcagcaataggctaaatttcttcctgagacatgtttgtggttgtcttaattgtgttaagaggctgaagggagaggctgcagcttgggtcacacgtttaaaccctgtctttaagtatatgtatatatgagaaatggccttggaatagttatgtttctactgaatcaggaaagggctgattgcgattgaaagctgctggtgtcagagcgtctccacctggagaacacccccaggtttgacctctgcccttctccctgctccagttctgtagccccatgtggcttggcacccggtgccagctggttacagacttgtcatctgagctgatggttttgtgggactatttttatgtccagctcctcggactacaccccaccccctgttctgccactggttgcctgcctctgcctgtacctcctggaatgctgattggcagttagggctggagtgggggctgggaagactgttataaagcctaaagggctaagggagcagctgtcacctggagctcctgcgtcccctgcccaccatggccacccaccgcctagtaatggtccgccacggtgagagctcatggaaccaagagaaccgtttctgtggctggtttgatgcagaactgagtgagaagggggcagaggaggccaagcggggggccactgccatcaaagatgccaagatagagtttgacatctgctacacgtcggtgctgaagcgggctatccgcaccctttggaccatcctggatgttacggaccaaatgtgggtgcccgtggtgcgcacctggcgcctcaatgagcggcactatggaggtctcacgggcctcaataaggctgagacggctgcaaagcatggggaggagcaggtgaagatctggaggcgttcctttgacaccccgccaccacctatggacgagaaacacaactactacgcctccatcagcaaggtgggccaggtgctgggaaggtgtaaggttgggagcccagggtgggagggctacccagtaaacaaacagaaatgttcccgtccccttgtccccaggatcggcgctatgcaggcttgaagcctgaggagctgcctacctgtgagagcctcaaggacaccattgcccgggctctgcccttctggaatgaggagatcgcacctaagattaaggctggcaagagagtccttattgcagcccatgggaacagccttcgaggcattgtcaagcatctggaaggtgtaggccgctctcaggaaagagtgcgagacagaataccgtaagtagtgtctgtagccatggtatcccttaacctttaggcacctttctgtggccttgctctcagggatgggttaactgccagcaccccaggcccagatgacccacaaaggtcacttctgtatgaactgaacggaaggggcctaaaacagtgttactctacttcagggatgtcagaccaggccatcatggaactgaatctgcccaccggaatccccattgtctatgagctgaaccaggagctgaagcccaccaagcccatgaggttcctgggagacgaagagacagttcggaaggccatggaggctgtggctgcccagggaaaggcaaagtgagagtgggtgggcggaataaagtcaacttctgcacagccacggtcggtatggccaggtttggtccacccaggccaacaggacctccttggtcagggttacagctatccccaagtcacccatgtagaggcaaagccagcaccccatcccaggcctactggcatgatcagacccctttgcacaccc

SEQ ID NO: 14025 - protein, 252 aa, Rattus norvegicus
  ref <308>: DATABASE ACCESSION NUMBER: SWISS-Prot / CAA78967
  ref <309>: DATABASE ENTRY DATE: 2002-06-15
ATHRLVMVRHGESSWNQENRFCGWFDAELSEKGAEEAKRGATAIKDAKIEFDICYTSVLKRAIRTLWTILDVTDQMWVPVVRTWRLNERHYGGLTGLNKAETAAKHGEEQVKIWRRSFDTPPPPMDEKHNYYASISKDRRYAGLKPEELPTCESLKDTIARALPFWNEEIAPKIKAGKRVLIAAHGNSLRGIVKHLEGMSDQAIMELNLPTGIPIVYELNQELKPTKPMRFLGDEETVRKAMEAVAAQGKAK

SEQ ID NO: 14026 - DNA, 3771 bp, Homo sapiens
  ref <308>: DATABASE ACCESSION NUMBER: EMBL / J05073
  ref <309>: DATABASE ENTRY DATE: 1999-07-02
ccatggccccttcattagggccccaattgtgactttattgctcatagtctcttccctgccttggtggctctcatcccccaaacctgaatgcagaagtcttggtcctagactcaactccgtgccacccttcagcctacgttgtgggttcctgctaagctgagcatttacctaacaatcaagacttctgacagtcctcagtcctgcccccaaacccccttggatttctctttttcaaggtggtttcggctaggagagtgagcgtggcttgggtgagggcagatagggtgggagcatggggcatgtatggatgagaccttgacaaagggaccccggaggaaagacaggggccctttccccctttgtcctggaaacccggctcagccccagcccttgcccattctgctgctgctgcctggtaccttccacaaggccagactcctctccacaaagctgtggtctgcaccagctcctctggctctcctcctctgcctgctgagggccgcctcctagcctggctgccaatcacaggagaaaggggttgggattttgtttgtgcctctgtctgagcagagaatggctgataggcactgagcgttgccctggagagcccctctgtccctgctatccccatctcccctggcccagacttctgcccttcacgcccatccctgaccagcagccccactcagtctgggctctgggtgccagctgtatagacatgccacctgaacccaggccagagctggtgatgcgtggggctattttaagcacagcctcttggcctgcacactcccctggcccccagcccccagcagctcagctactggtcacctgccaccgcctggaatgctgattggcagttggctggggtgggtgggggctgggaagacactattataaagctgggagtgttgggaagcagccgtccccgtccagagtcctctgtggtccctgctgccaccatggccactcaccgcctcgtgatggtccggcacggcgagagcacatggaaccaggagaaccgtttctgtggctggttcgatgcagagctgagtgaaaaggggaccgaggaggccaagcggggagccaaggccatcaaggatgccaagatggagtttgacatctgctacacgtcagtgctgaagcgggccatcccgaccctctgggccatcctggacggcacggaccagatgtggctgcctgtggtgcgcacttgccgcttcaatgagcggcattacgggggcctcacaggcctcaacaaggcagaaacggccgccaagcacggggaggagcaggtgaagatctggaggcgctccttcgacatcccgccgcccccgatggacgagaagcacccctactacaactccattagcaaggtgggctgcctttgctgggaaggcctctgggaagctgcagagtggggagtcgggtgggggcccactggcttgggagggaaagcagcgtgcctgtgtcccccaggagcgtcggtacgcaggcctgaagcccggggaactccccacctgcgagagcctcaaggacaccattgcccgggccctgcccttctggaacgaggagattgttccccagatcaaggccggcaagcgagtgctcattgcagcccacgggaacagcctgcggggcattgtcaagcacctggaaggtaggccaccttcaggagcctgggcagggtgggtgggcagcagccagctggcttctcatctcagcaaagtctctcgccatgaccagctttctagcgtggctccacatcattcactgaaaagaggctgagaagccattttttagttttgtgaaattttccccatttctgtgtaactggacacactccacaggggctgactgcactcgaagctcgctgtgtcccgaggtggggcaggctccaaaggtggcatctgccaagggacacccagctaggaaacggaagggctgggcttagagcatctggctccaaatcccaacttactgtggggccctggacaagccacctccatctctgggcctctcccttttccggggtggtggggagctccccctggtactgaattcctcttgatgtaggcttggacccctcgcagggccctcccccatcaggtcctcagaatccctgcatgagcttcaccacctatctccctctggagcccctctctgggcaaaggaaagaccaatcaaaagaggggtgcaggactatggagtggccagactctgggcttgcagctgggctcccactgaagagcaagggctgacaaatgggcccgggatgcatgggcgcagtaaggcctcgcccagagtgactggcacctccgtccgcctcccaccttagtattctgacacaagggcagtctaaattagcatctgaatgaccttaaagcttgttgagtcctggaaaggctagaagggtgtgccccagacctcctgctcctagggccgttgggcagttggccagagcacccagaccggcaggccccggagacccagccagccccaagcctgcccgctccaaacacggacacctggcacctggcactggggccaggcagagggaaggaccacctgcctcctctcccttccggagacttcatgcagccccatgaccctcccacagcctggtttggggaaaggggacgcacttttggtggtgaatatgagggatttcactctgactccccagagaacattttcttaaacccctccctgcacggagcaggggtggagtggcgcgaacatcaaaggtcgagctgctattcccagctcaggggctgcaggaggcaggcagggtcaggtttcgaccaggctcggcctccctgtccctcctccagctccattccgcacttgctcctctgttcaggatgtctagaatttagagcactttagaaacaaagggtgctgggcacggtggctcactcctgtaatcccagcactttgggaggctgaggcaggcagatcacctgaggtcaggagtttgagaccagcctgaccaacatggtaaaacccgtttctactaaaaatacaaaattagccgggtgtggtggcgctcacctgtaatcccagctacttgggaggctgaggcagaatcacttcaacccaggagatggaggttgcagtgagccaagatcgtgccactgcactccagcctgggcaagaggagtaaaactccatctcaaaaaaaagaaaaagaaaaagaaaagaaaaaaaaaaaccaaagggtgagtgtcccttcctgaccctcaacttcagtctggctggagtcacactgggctgagggaactatggacagcaccaccacagatcacagccacttgggtggggctgaagtccccatttttttcaccactgggctatttctgtaggctgcttggtctaactcagttactccttgacctttggcaacatttctgtggcctcgttctcagggctgggaaggaattggtgccaggggaactggctctgtggaccataaaggtcacatagtgtctgctgtgtaaacaggctggggacagaggggctaaggacacctattccttccggcatagggatgtcagaccaggcgatcatggagctgaacctgcccacggggatccccattgtgtatgagctgaacaaggagctgaagcccaccaagcccatgcagttcctgggtgatgaggaaacggtgcggaaggccatggaggctgtggctgcccagggcaaggccaagtgaggggtgggcttgggcaataaaggcacctcccccaacagcctggagtctccagcgca

SEQ ID NO: 14027 - protein, 252 aa, Homo sapiens
  ref <308>: DATABASE ACCESSION NUMBER: SWISS-Prot / P15259
  ref <309>: DATABASE ENTRY DATE: 2002-06-15
ATHRLVMVRHGESTWNQENRFCGWFDAELSEKGTEEAKRGAKAIKDAKMEFDICYTSVLKRAIRTLWAILDGTDQMWLPVVRTWRLNERHYGGLTGLNKAETAAKHGEEQVKIWRRSFDIPPPPMDEKHPYYNSISKERRYAGLKPGELPTCESLKDTIARALPFWNEEIVPQIKAGKRVLIAAHGNSLRGIVKHLEGMSDQAIMELNLPTGIPIVYELNKELKPTKPMQFLGDEETVRKAMEAVAAQGKAK

SEQ ID NO: 14028 - DNA, 1380 bp, Rattus norvegicus
  ref <308>: DATABASE ACCESSION NUMBER: EMBL / Z22812
  ref <309>: DATABASE ENTRY DATE: 1994-12-16
catcatagaaggtgaaagtctgtcctgattgagccttcctcagcagccaagaaactgcaaggtacacgaatgcagagctccaggctccgagggtcctgtgcactctggaagttggtgtggacgatgttcatcttgcttgtgttagtaactggggtttcagctttcaccactccagcagtggtgcacacaggaagggtttctgagtctcccgttacatcagagaagcacccagttcttggagacgattgctggtttcgtggcagagatttcaaatcggaattgaggctggaaggtgagcccgtggtcctgaggtgccccctggtacctcattcagacacctccagcagttcccgcagccttctgacatggagtaaatcggactcttctcagctgatcccaggagatgagccaaggatgtgggtgaaggatgatacgctctgggttctgccagcagttcagcaggactctggtacctacatctgcacattcagaaacgcgtcccactgtgaacaaatgtctctggaactcaaggtctttaagaataccgaagcctctttccctctcgtctcctacttgcaaatctcagctctctcctccaccgggttacttgtgtgccctgacctgaaagagttcatctccagcagaactgatggaaagatacagtggtataagggctccatcctcttggataaaggcaataagaaatttctgagtgcgggagaccccacacgcctattgatatccaacacatccatgggagatgcaggctattacagatgtgttatgacatttacctacgagggcaaggaatacaacatcactaggaatattgaactccgggtcaaaggaataaccacagaacccatccctgtgatcatttctcccctggagacaataccagcatctttggggtcaagactgatagtcccgtgcaaggtgttcctgggaactggtacatcttccaacaccatcgtgtggtggatggctaacagcacgtttatctcagtggcctacccaagaggccgtgtgactgaggggctacaccaccagtactcagagaatgatgagaactacgtggaagtgtcgctgatttttgatccagtcacaaaggaggatctaaatacagattttaaatgtgttgccacgaatccacggagttttcagtcactccataccacagtcaaagaagtttcttccacgttctcctggggcatcgcgctggcacctctgtctctgatcatcttggttgtgggggcgatatggattcgcagaaggtgtaaacgccaggctggaaagacgtatgggctgaccaagctaccgactgacaaccaggacttcccttccagcccaaaccaaataaaggaaatgaaataataaaaa

SEQ ID NO: 14029 - protein, 416 aa, Rattus norvegicus
  ref <308>: DATABASE ACCESSION NUMBER: SWISS-Prot / CAA80465
  ref <309>: DATABASE ENTRY DATE: 2002-06-15
MFILLVLVTGVSAFTTPAVVHTGRVSESPVTSEKHPVLGDDCWFRGRDFKSELRLEGEPVVLRCPLVPHSDTSSSSRSLLTWSKSDSSQLIPGDEPRMWVKDDTLWVLPAVQQDSGTYICTFRNASHCEQMSLELKVFKNTEASFPLVSYLQISALSSTGLLVCPDLKEFISSRTDGKIQWYKGSILLDKGNKKFLSAGDPTRLLISNTSMGDAGYYRCVMTFTYEGKEYNITRNIELRVKGITTEPIPVIISPLETIPASLGSRLIVPCKVFLGTGTSSNTIVWWMANSTFISVAYPRGRVTEGLHHQYSENDENYVEVSLIFDPVTKEDLNTDFKCVATNPRSFQSLHTTVKEVSSTFSWGIALAPLSLIILVVGAIWIRRRCKRQAGKTYGLTKLPTDNQDFPSSPNQIKEMK

SEQ ID NO: 14030 - DNA, 1286 bp, Homo sapiens
  ref <308>: DATABASE ACCESSION NUMBER: Refseq / NM_004633
  ref <309>: DATABASE ENTRY DATE: 2002-11-05
gccacgtgctgctgggtctcagtcctccacttcccgtgtcctctggaagttgtcaggagcaatgttgcgcttgtacgtgttggtaatgggagtttctgccttcacccttcagcctgcggcacacacaggggctgccagaagctgccggtttcgtgggaggcattacaagcgggagttcaggctggaaggggagcctgtagccctgaggtgcccccaggtgccctactggttgtgggcctctgtcagcccccgcatcaacctgacatggcataaaaatgactctgctaggacggtcccaggagaagaagagacacggatgtgggcccaggacggtgctctgtggcttctgccagccttgcaggaggactctggcacctacgtctgcactactagaaatgcttcttactgtgacaaaatgtccattgagctcagagtttttgagaatacagatgctttcctgccgttcatctcatacccgcaaattttaaccttgtcaacctctggggtattagtatgccctgacctgagtgaattcacccgtgacaaaactgacgtgaagattcaatggtacaaggattctcttcttttggataaagacaatgagaaatttctaagtgtgagggggaccactcacttactcgtacacgatgtggccctggaagatgctggctattaccgctgtgtcctgacatttgcccatgaaggccagcaatacaacatcactaggagtattgagctacgcatcaagaaaaaaaaagaagagaccattcctgtgatcatttcccccctcaagaccatatcagcttctctggggtcaagactgacaatcccgtgtaaggtgtttctgggaaccggcacacccttaaccaccatgctgtggtggacggccaatgacacccacatagagagcgcctacccgggaggccgcgtgaccgaggggccacgccaggaatattcagaaaataatgagaactacattgaagtgccattgatttttgatcctgtcacaagagaggatttgcacatggattttaaatgtgttgtccataataccctgagttttcagacactacgcaccacagtcaaggaagcctcctccacgttctcctggggcattgtgctggccccactttcactggccttcttggttttggggggaatatggatgcacagacggtgcaaacacagaactggaaaagcagatggtctgactgtgctatggcctcatcatcaagactttcaatcctatcccaagtgaaataaatggaatgaaataattcaaacac

SEQ ID NO: 14031 - protein, 398 aa, Homo sapiens
  ref <308>: DATABASE ACCESSION NUMBER: Refseq / NP_004624
  ref <309>: DATABASE ENTRY DATE: 2002-11-05
MLRLYVLVMGVSAFTLQPAAHTGAARSCRFRGRHYKREFRLEGEPVALRCPQVPYWLWASVSPRINLTWHKNDSARTVPGEEETRMWAQDGALWLLPALQEDSGTYVCTTRNASYCDKMSIELRVFENTDAFLPFISYPQILTLSTSGVLVCPDLSEFTRDKTDVKIQWYKDSLLLDKDNEKFLSVRGTTHLLVHDVALEDAGYYRCVLTFAHEGQQYNITRSIELRIKKKKEETIPVIISPLKTISASLGSRLTIPCKVFLGTGTPLTTMLWWTANDTHIESAYPGGRVTEGPRQEYSENNENYIEVPLIFDPVTREDLHMDFKCVVHNTLSFQTLRTTVKEASSTFSWGIVLAPLSLAFLVLGGIWMHRRCKHRTGKADGLTVLWPHHQDFQSYPK

SEQ ID NO: 14032 - DNA, 1828 bp, Rattus norvegicus; identical to SEQ ID NO: 10469
  ref <308>: DATABASE ACCESSION NUMBER: EMBL / Z50144
  ref <309>: DATABASE ENTRY DATE: 1996-02-29

SEQ ID NO: 14033 - protein, 425 aa, Rattus norvegicus; identical to SEQ ID NO: 10470
  ref <308>: DATABASE ACCESSION NUMBER: Refseq / NP_058889
  ref <309>: DATABASE ENTRY DATE: 2002-11-05

SEQ ID NO: 14034 - DNA, 2231 bp, Homo sapiens; identical to SEQ ID NO: 10471
  ref <308>: DATABASE ACCESSION NUMBER: Refseq / NM_016228
  ref <309>: DATABASE ENTRY DATE: 2002-05-16

SEQ ID NO: 14035 - protein, 425 aa, Homo sapiens; identical to SEQ ID NO: 10472
  ref <308>: DATABASE ACCESSION NUMBER: Refseq / NP_057312
  ref <309>: DATABASE ENTRY DATE: 2002-05-16

SEQ ID NO: 14036 - DNA, 5721 bp, Rattus norvegicus; identical to SEQ ID NO: 10480
  ref <308>: DATABASE ACCESSION NUMBER: EMBL / Z78279
  ref <309>: DATABASE ENTRY DATE: 2002-02-18

SEQ ID NO: 14037 - protein, 1453 aa, Rattus norvegicus; identical to SEQ ID NO: 10481
  ref <308>: DATABASE ACCESSION NUMBER: SWISS-Prot / CAB01633
  ref <309>: DATABASE ENTRY DATE: 2002-10-01

SEQ ID NO: 14038 - DNA, 855 bp, Homo sapiens
  ref <308>: DATABASE ACCESSION NUMBER: EMBL / S64596
  ref <309>: DATABASE ENTRY DATE: 2002-09-21
ccccccggccctcctggacctcctggtccccctggtcctcccagcgctggtttcgacttcagcttcctcccccagccacctcaagagaaggctcacgatggtggccgctactaccgggctgatgatgccaatgtggttcgtgaccgtgacctcgaggtggacaccaccctcaagagcctgagccagcagatcgagaacatccggagcccagagggcacccgcaagaaccccgcccgcacctgccgtgacctcaagatgtgccactctgactggaagagtggagagtactggattcaccccaaccaaggctgcaacctggatgccatcaaagtcttctgcaacatggagactggtgagacctgcgtgtaccccactcagcccagtgtggcccagaagaactggtacatcagcaagaaccccaaggacaagaggcatgtctggttcggcgagacgatgaccgatggattccagttcggcggccagggctccgaccctgccgatgtggccatccagctgaccttcctgcgcctgatgtccaccgaggcctcccagaacatcacctaccactgcaagaacagcgtggcctacatggaccagcagactggcaacctcaagaaggcccggctcctccagggctccaacgagatcgagatccgcgccgagggcaacagccgcttcacctacagcgtcactgtcgatggctgcacgagtcacaccggagcctggggcaagacagtgattgaatacaaaaccaccaagtcctcccgcctgcccatcatcgatgtggcccccttggacgttggtgccccagaccaggaattcggcttcgacgttggccctgtctgcttcctgtaa

SEQ ID NO: 14039 - protein, 284 aa, Homo sapiens
  ref <308>: DATABASE ACCESSION NUMBER: SWISS-Prot / AAB27856
  ref <309>: DATABASE ENTRY DATE: 2001-06-01
PPGPPGPPGPPGPPSAGFDFSFLPQPPQEKAHDGGRYYRADDANVVRDRDLEVDTTLKSLSQQIENIRSPEGTRKNPARTCRDLKMCHSDWKSGEYWIHPNQGCNLDAIKVFCNMETGETCVYPTQPSVAQKNWYISKNPKDKRHVWFGETMTDGFQFGGQGSDPADVAIQLTFLRLMSTEASQNITYHCKNSVAYMDQQTGNLKKARLLQGSNEIEIRAEGNSRFTYSVTVDGCTSHTGAWGKTVIEYKTTKSSRLPIIDVAPLDVGAPDQEFGFDVGPVCFL

SEQ ID NO: 14040 - DNA, 5721 bp, Rattus norvegicus; identical to SEQ ID NO: 10480
  ref <308>: DATABASE ACCESSION NUMBER: EMBL / Z78279
  ref <309>: DATABASE ENTRY DATE: 2002-02-18

SEQ ID NO: 14041 - protein, 1453 aa, Rattus norvegicus; identical to SEQ ID NO: 10481
  ref <308>: DATABASE ACCESSION NUMBER: SWISS-Prot / CAB01633
  ref <309>: DATABASE ENTRY DATE: 2002-10-01

SEQ ID NO: 14042 - DNA, 855 bp, Homo sapiens; identical to SEQ ID NO: 14038
  ref <308>: DATABASE ACCESSION NUMBER: EMBL / S64596
  ref <309>: DATABASE ENTRY DATE: 2002-09-21

SEQ ID NO: 14043 - protein, 284 aa, Homo sapiens; identical to SEQ ID NO: 14039
  ref <308>: DATABASE ACCESSION NUMBER: SWISS-Prot / AAB27856
  ref <309>: DATABASE ENTRY DATE: 2001-06-01

SEQ ID NO: 14044 - DNA, 5721 bp, Rattus norvegicus; identical to SEQ ID NO: 10480
  ref <308>: DATABASE ACCESSION NUMBER: EMBL / Z78279
  ref <309>: DATABASE ENTRY DATE: 2002-02-18

SEQ ID NO: 14045 - protein, 1453 aa, Rattus norvegicus; identical to SEQ ID NO: 10481
  ref <308>: DATABASE ACCESSION NUMBER: SWISS-Prot / CAB01633
  ref <309>: DATABASE ENTRY DATE: 2002-10-01

SEQ ID NO: 14046 - DNA, 855 bp, Homo sapiens; identical to SEQ ID NO: 14038
  ref <308>: DATABASE ACCESSION NUMBER: EMBL / S64596
  ref <309>: DATABASE ENTRY DATE: 2002-09-21

SEQ ID NO: 14047 - protein, 284 aa, Homo sapiens; identical to SEQ ID NO: 14039
  ref <308>: DATABASE ACCESSION NUMBER: SWISS-Prot / AAB27856
  ref <309>: DATABASE ENTRY DATE: 2001-06-01

SEQ ID NO: 14048 - DNA, 2610 bp, Rattus norvegicus
  ref <308>: DATABASE ACCESSION NUMBER: EMBL / AJ001529
  ref <309>: DATABASE ENTRY DATE: 2000-10-30
gtgggcttcggccggctgctcccaggctcctttccttcctacggccttcacggtccattcggtccctctttctgccaccggccgccatggagcagccgccggcgcccaagagtaagctaaaaaagctgagtgaagacagtttgactaagcagcctgaagaggtctttgatgttttggagaagcttggagaagggtcttatggaagtgtttttaaagcaatacataaggaatctggtcaagttgttgcaattaagcaagtacctgttgagtcagatgttcaggaaataatcaaagaaatttccataatgcaacaatgtgacagcccttacgtggtgaagtactatggcagttactttaagaacacagacctctggattgttatggagtactgtggggccgggtccgtttcagacataattagattacgaaacaagacattaacggaagatgaaattgcaactattctaaaatccacgttgaaaggattagaatatttgcattttatgaggaaaatacacagagatataaaagctgggaatattctcctcaatacagaaggacatgcaaagcttgcagattttggagtggctggccagttaacagacacgatggcaaaacgcaatactgtaataggaaccccgttttggatggctcccgaggtaattcaagaaataggttacaactgtgtggctgacatctggtcccttggcattacgtctatagaaatggcagaaggaaaacctccttatgctgatatacatccaatgagggctatttttatgattcctacaaacccaccaccaacattcaggaaacctgagctctggtctgacgacttcacggattttgtgaagaagtgcttggtgaagagtcctgagcagagggccactgccacccagctgttacagcatcctttcatcaagaatgcgaagcccgtgtcgatattgagagagctgatcacggaaggcatggaaatcaaggccaagcggcatgaggagcagcagcgagagctggaggacgaggaggaaaactcggatgaagatgagctggattcgcacactatggtgaagactagttcagaaggtgtgggcacaatgcgggccaccagcacgatgagtgaaggggcccagaccatgattgaacacaacagcaccatgctagagtcggacctggggaccatggtgataaacagtgaggatgaagaggaggaagacggaaccatgaaaagaaatgcaacgtcaccccaagtacaaagaccttctttcatggactactttgataagcaggacttcaagaacaagagtcatgaaaattgtgatcagagcatgcgtgagccatgccctatgtcaaacaatgtttttcctgacaactggagagttcctcaagatggagactttgattttttaaaaaatctaagtttagaagaactacagatgcggctaaaagcactggaccccatgatggaacgagaaatagaagaactgcatcaaagatacagtgcgaaaagacagcccatcctggatgccatggatgccaaaaagaggaggcagcagaatttctgaccagatcccttctgtctctgtgtgaccagagaccaaggaacacaggaattgaaggaactgtaatactttttaatccctaaaatgtatactctacaatttttttagaagtcaaaaatgatggtacacacctagataaatttcccaaaagcaaactttgcagttgtgtcctcgatgacgtcggtttaaacggatgagaacaatacacatgcgcacctctctctctgccagccgttacctgcaacagaaccaacctgcgactgaagccgcctgtggaggcggagtccagcgccattgctttgggctcacagcactgcagggcttgtgttgccctgatcttccttcctgtggagaagcctatttattgaccccctaggtagacttatttatttatgcagctttttttttttggaggggggggttctaaaaaaagatcaggatagttttggtgaatgtccagacacatcacagattgtaacactcaaccaaattgtacactaagcagggagctatgggtgtattcctttatctccagtaaaaataaagccataatgtccacatggaccagacaattttataagtgttaattcttgattttgatattggtacaaataaaactatatatacataggtcaaaaagagttatacagtgtaaaaccaaagaaatcaatgaatttttgcaccaaaaaagtgtgggaaatatttttaaagacatgaaacccaagaagacagtgcagtcgttaatgtttcctttattggtctgtagtaacttcaagttcattctatgggacatgcttctgtcacagggcttttgttgacttcattctactcctgggaattggtaagcatcatgtatctgacaataaagcagtaatatgtttatactaaaactgtgtgtccttagggcctaaaaaatgaaagcattagaaaaaggctcctttctgagaagcaattagcatttgtgtaattgacctgggaccagtcatttcctgcactacacagggccattttgatatcgtgttcttttatgtgttaattactatgtgtgcag

SEQ ID NO: 14049 - protein, 492 aa, Rattus norvegicus
  misc_feature (1)..(492): Xaa=Unknown amino acid
MEQPPAPKSKLKKLSEDSLTKQPEEVFDVLEKLGEGSYGSVFKAIHKESGQVVAIKQVPVESDVQEIIKEISIMQQCDSPYVVKYYGSYFKNTDLWIVMEYCGAGSVSDIIRLRNKTLTEDEIATILKSTLKGLEYLHFMRKIHRDIKAGNILLNTEGHAKLADFGVAGQLTDTMAKRNTVIGTPFWMAPEVIQEIGYNCVADIWSLGITSIEMAEGKPPYADIHPMRAIFMIPTNPPPTFRKPELWSDDFTDFVKKCLVKSPEQRATATQLLQHPFIKNAKPVSILRELITEGMEIKAKRHEEQQRELEDEEENSDEDELDSHTMVKTSSEGVGTMRATSTMSEGAQTMIEHNSTMLESDLGTMVINSEDEEEEDGTMKRNATSPQVQRPSFMDYFDKQDFKNKSHENCDQSMREPCPMSNNVFPDNWRVPQDGDFDFLKNLSLEELQMRLKALDPMMEREIEELHQRYSAKRQPILDAMDAKKRRQQNFX

SEQ ID NO: 14050 - DNA, 2820 bp, Homo sapiens
  ref <308>: DATABASE ACCESSION NUMBER: EMBL / U26424
  ref <309>: DATABASE ENTRY DATE: 1999-06-30
ccgcggagttacgggaaagttggtccgagttcccagagtttccctctgtggtgccctaggcttcggcccggtgccccggctcctttcctcctttcggccttcgccgtccaccaggtccctctctctgtcccggccgccatggagcagccgccggcgcctaagagtaaactaaaaaagctgagtgaagacagtttgactaagcagcctgaagaagtttttgatgtattagagaagcttggagaagggtcttatggaagtgtatttaaagcaatacacaaggaatccggtcaagttgtcgcaattaaacaagtacctgttgaatcagatcttcaggaaataatcaaagaaatttccataatgcagcaatgtgacagcccatatgttgtaaagtactatggcagttattttaagaatacagacctctggattgttatggagtactgtggcgctggctctgtctcagacataattagattacgaaacaagacattaatagaagatgaaattgcaaccattcttaaatctacattgaaaggactagaatatttgcactttatgagaaaaatacacagagatataaaagctggaaatattctcctcaatacagaaggacatgcaaaattggcagattttggagtggctggtcagttaacagatacaatggcaaaacgcaatactgtaataggaactccattttggatggctcctgaggtgattcaagaaataggctataactgtgtggccgacatctggtcccttggcattacttctatagaaatggctgaaggaaaacctccttatgctgatatacatccaatgagggctatttttatgattcccacaaatccaccaccaacattcagaaagccagaactttggtccgatgatttcaccgattttgttaaaaagtgtttggtgaagaatcctgagcagagagctactgcaacacaacttttacagcatccttttatcaagaatgccaaacctgtatcaatattaagagacctgatcacagaagctatggagatcaaagctaaaagacatgacgaacagcaacgagaattggaagaggaagaagaaaattcggatgaagatgagctggattcccacaccatggtgaagactagtgtgggagagtgtggcaccatgcgggccacaagcacgatgagtgaaggggcccagaccatgattgaacataatagcacgatgttggaatccgacttggggaccatggtgataaacagtgaggatgaggaagaagaagatggaactatgaaaagaaatgcaacctcaccacaagtacaaagaccatctttcatggactactttgataagcaagacttcaagaataagagtcacgaaaactgtaatcagaacatgcatgaacccttccctatgtccaaaaacgtttttcctgataactggaaagttcctcaagatggagactttgactttttgaaaaatctaagtttagaagaactacagatgcggttaaaagcactggaccccatgatggaacgggagatagaagaacttcgtcagagatacactgcgaaaagacagcccattctggatgcgatggatgcaaagaaaagaaggcagcaaaacttttgagtctaatttcctctctgtttttaactattctggagaccaagaaaccactaggaattgaaggaatatttggatatttttaatcctaagattttgccctacaattaggcagaggtcaaaaagtgacaatggtacatgcccaggtaaattcccaaaaggcagaattgacagttgtatctgctgtgcattcactctaagatgaggagaacaaaagaagtgtattctcttgttctgtcagctgcataccagtaataaaactgttatgaaatggattttcaaggtctctaaaccttgaaaatccaaaggctattgttgcattgtacagcactgaaagggctttatgttacaatattctttattcctatctagtatactaggctatttattgtccccttaggtaaacttatttatttatgctattttggctttgtttcattttttaaggacaagatcaggatagctttggtgaaggtagggtcatattaatatgatgataatgtgcaaccaatttatactttctgcagggagctatggggtacattccttgatttccaggatagtttttcaaataggaaagcaataatggcagtagttctcaaatgggctaggccttttttatattgaagcaataattccatttttaccctttgaaattttgtttttttgatttttgatgtttggtacaaatagaactatatatatttaggtaaaatagatctatcgtgtttaaaaccaaagaaatcaatggaacccttgcacaaaaaagtgtgataaatatttttaaataaaaacttaatacaaatgtaatttgttaatattgtttcatgttttatgtgtagatctaatagctgaactgattcaaactgtaataagctcatcaatttcatttctatgaaaatgtgctctgttgtcacaggatgtttctgttgattttattcatttcctgggaattggtaaacatcatgttcctgatgataacccagtagcaaaaacatttgtactgagtggtacaagccttggggactgaaaaaaaaaaaagattaaaaccattaaaaagaaactcatttttacgctgaatgaacatttatatgattgcattgggaccagtcatttcctaagctacatatggccatcttgacagtgttttttcttttgtgtgtttaattattatgtgtaaatcataaagacaaataaatttcactgtgccac

SEQ ID NO: 14051 - protein, 492 aa, Homo sapiens
  misc_feature (1)..(492): Xaa=Unknown amino acid
MEQPPAPKSKLKKLSEDSLTKQPEEVFDVLEKLGEGSYGSVFKAIHKESGQVVAIKQVPVESDLQEIIKEISIMQQCDSPYVVKYYGSYFKNTDLWIVMEYCGAGSVSDIIRLRNKTLIEDEIATILKSTLKGLEYLHFMRKIHRDIKAGNILLNTEGHAKLADFGVAGQLTDTMAKRNTVIGTPFWMAPEVIQEIGYNCVADIWSLGITSIEMAEGKPPYADIHPMRAIFMIPTNPPPTFRKPELWSDDFTDFVKKCLVKNPEQRATATQLLQHPFIKNAKPVSILRDLITEAMEIKAKRHDEQQRELEEEEENSDEDELDSHTMVKTSVGECGTMRATSTMSEGAQTMIEHNSTMLESDLGTMVINSEDEEEEDGTMKRNATSPQVQRPSFMDYFDKQDFKNKSHENCNQNMHEPFPMSKNVFPDNWKVPQDGDFDFLKNLSLEELQMRLKALDPMMEREIEELRQRYTAKRQPILDAMDAKKRRQQNFX

SEQ ID NO: 14052 - DNA, 2427 bp, Rattus norvegicus
  ref <308>: DATABASE ACCESSION NUMBER: EMBL / AJ002556
  ref <309>: DATABASE ENTRY DATE: 1998-08-05
gccctctcgctgcgccatggcttaagcccacagcctccttgccaagcatctccttgctcggccggggtctgctagacaccgcagtcgcagagagggcgcgcccagacgccctaggcctggactctgggacgccgagcctcgctcccattcttcactggtcacagcaggtcctctgcagaaggcgtttacagccggtaatcgagggactttacggactttcagtggtacctcgtccccgggtgctttttgagggaggaggacgaggcaaagggcttttaaggggaggaagcagtgggatccacattggcgggtctgggttggagttaaagggagatcggaggtttgatttaggaccacaaaaaggctttgcgactagcattatggcgtggccgtgcatcactagggcctgctgcatcgcccgcttctggaaccagctggacaaggcggacattgcggtgccgctggttttcaccaagtactcggaggccaccgaacatccaggcgcccctccgcagccaccagcgccgccgcagcccgggttagcgcccccctcgcgtgctgtcgccatagagacgcagccagcccagggagagtcggatgcagttgcccgggcaacagggccggcacccgggcccagcggtgaccgcgagactgcagccgcccccggccggagcgggctgggcttgggcgcggcctccggctccacttccggctcaggcccggcggactcggtgatgcgacaggactaccgtgcctggaaggtgcagcggcccgagcccagctgccggccgcgaagcgagtaccagccgtccgacgcgcccttcgagcgcgagacccagtaccagaaggacttccgcgcctggccactgccccgccgcggggaccacccctggatccccaagcccgtgcagatccctgcgacttcgcagccttccccgcctgttctcgggatgcccaagcgtcggcctcaaagccaagagcgcgggcccatacaactttctgctgatgcccgggacccggagggtgctggaggagccggggtgccggcggccggaaaggcgtccggtgcagaccagcgtgacacacgccggaaggcagggccagcatggatggtgactcgcaccgaagggcacgaggagaagcctctgcccccggcccagtcccagacccaggaaggcggtcctgcagctggaaaggcgtccggtgcagatcagcgtgacacacgccggaaggcgggacccgcgtggatggtgactcgcaccgaagggcacgaggagaagcctctgcccccggcccagtcccagacccaggaaggcggtcctgcagctggaaaggcgtccggtgcagatcagcgtgacacacgccggaaggcgggacccgcgtggatggtgactcgcaccgaagggcacgaggagaagcctctgcccccggcccagtcccagacccaggaaggcggtcctgcagctggaaaggcgtccggtgcagatcagcgtgacacacgccggaaggcgggacccgcgtggatggtgactcgcaccgaagggcacgaagagacgcctctgccacccgcccagtcccagacccaggagggcggccctgcagctggaaaggcgtccggtgcagatcagcgtgacacacgccggaaggcgggacccgcgtggatggtgactcgcaccgaagggcacgaagagacgccgctgccacccgcccagtcccagacccaggagggcggccctgccgctggaaaggcatctggtgcagatgaacgcgacacgaggaggaaggcggggccggcctggatggtgcgtcgctccgaggggcacgagcagacgaccgctgcccatgcccaaggcacagggcccgaaggaggcaaagggcgcgcggtggctgatgccctcaacaggcaaattcgggaggaggtgacgagtacagtaagcagctcctacaggaacgaattcagagcgtggacagacatcaagcctgtgaaaccaatcaaagccaagccccagtacaagcccccagatgacaagatggttcacgaaaccagctacagtgcccagttcaaaggggaggccagtaagcccaccacagcggacaacaaggtcgtggatcgcagaagaatacgaagcctctacagtgagcctttcaaggaatccccgaaggtggagaaacctagtgttcagagttccaaaccaaaaaagacctcaacgagccagaagcccctgaggaaggccaaagacaagcaggtggcgtcgggccaggccgccaagaaaaagaccacagagagccccagtgccaccaaacctgacgacaaggagcaaagcaaagagatgaacaataaactggctgaggcgaaagagtaaatgtccccgcactttccttttttcccctcccccacccctatgtttaaaccaacaaacaaaaaaa

SEQ ID NO: 14053 - protein, 660 aa, Rattus norvegicus
  ref <308>: DATABASE ACCESSION NUMBER: SWISS-Prot / CAA05555
  ref <309>: DATABASE ENTRY DATE: 2001-12-01
MAWPCITRACCIARFWNQLDKADIAVPLVFTKYSEATEHPGAPPQPPAPPQPGLAPPSRAVAIETQPAQGESDAVARATGPAPGPSGDRETAAAPGRSGLGLGAASGSTSGSGPADSVMRQDYRAWKVQRPEPSCRPRSEYQPSDAPFERETQYQKDFRAWPLPRRGDHPWIPKPVQIPATSQPSPPVLGMPKRRPQSQERGPIQLSADARDPEGAGGAGVPAAGKASGADQRDTRRKAGPAWMVTRTEGHEEKPLPPAQSQTQEGGPAAGKASGADQRDTRRKAGPAWMVTRTEGHEEKPLPPAQSQTQEGGPAAGKASGADQRDTRRKAGPAWMVTRTEGHEEKPLPPAQSQTQEGGPAAGKASGADQRDTRRKAGPAWMVTRTEGHEETPLPPAQSQTQEGGPAAGKASGADQRDTRRKAGPAWMVTRTEGHEETPLPPAQSQTQEGGPAAGKASGADERDTRRKAGPAWMVRRSEGHEQTTAAHAQGTGPEGGKGRAVADALNRQIREEVTSTVSSSYRNEFRAWTDIKPVKPIKAKPQYKPPDDKMVHETSYSAQFKGEASKPTTADNKVVDRRRIRSLYSEPFKESPKVEKPSVQSSKPKKTSTSQKPLRKAKDKQVASGQAAKKKTTESPSATKPDDKEQSKEMNNKLAEAKE

SEQ ID NO: 14054 - DNA, 4328 bp, Homo sapiens
  ref <308>: DATABASE ACCESSION NUMBER: EMBL / AB058781
  ref <309>: DATABASE ENTRY DATE: 2001-06-08
aagattatagagacttgctttagaaccacaagaagaaagaggaggccggcttttcagctagcatcatggcgtggccgtgcatcacgagggcctgctgcatcgcccgcttctggaaccagttggacaaagcggacatcgctgtgccgctggttttcaccaagtactcggaggccaccgagcacccgggcgccccgccgcagccaccgccgccgcagcagcaggcgcagccggcgctcgcgcccccctcggcgcgcgcggttgccatagagacgcagccagcccagggcgagttggatgcagttgcccgggcaacggggccagcgcctgggcctaccggcgagcgcgagccggcggcgggccccggccggagcgggccgggcccgggcctgggctccggctccacctccggccccgcggactcggtgatgcggcaggattaccgagcctggaaggtgcagcggcccgagcccagctgccggccgcgcagcgaataccagccctccgacgctcccttcgagcgcgagacccagtaccagaaggacttccgcgcctggccgctgccgcgccgcggggaccacccgtggatccccaagcccgtgcagatctctgcggcctcccaggcgtcggcgcccattctcggggcgcccaagcgccggccgcagagccaggagcgctggccagtgcaggccgccgctgaggcccgggagcaggaggcggcccccggcggagcgggtggcctggcggccggaaaggcgtccggggcggacgagcgcgacacgcgcaggaaggccgggcctgcctggatggtgcgccgcgccgagggcctggggcacgagcagacgccgctgcccgcggcccaggcccaggtccaggccaccggccccgaggctggcagggggcgcgccgcggcggacgccctcaaccggcaaatccgcgaggaggtggcgagtgcagtgagcagctcctacaggaatgaattcagggcatggacggacatcaagcctgtgaaaccaataaaggccaagccccagtacaagcccccagatgataagatggttcatgagaccagctacagtgctcagttcaaaggagaggccagcaagccaacaacagctgacaataaggtcattgatcgcagaagaatacgcagcctctacagcgaacccttcaaggaacccccaaaggtggaaaaacctagtgttcagagttccaaaccaaaaaagacctcagcgagccataagcccacgaggaaggccaaagacaagcaggcggtgtcaggccaggctgccaagaaaaagagcgcggagggcccgagtaccaccaagccagacgacaaggagcaaagcaaagagatgaacaataaactggctgaggcgaaagagtaaatttccctgcactttccttttactcttctctctctctccctccccccaactttttttttttaaaccaacaaaccaaaaaaggccacaaaattaattagaggcttctcatctgccttggtcctgagtgttccaggagctctttggtttggcttcttttgatggaagaatcctgcttcacagactgagtggcaggcctcctcctgagggcagcccctggagcaccaggaagcgttgccgctggctgtgccctcccctggcactctgactgcatgctgatgagcaaggcaggcaggtctgagaggcgaaacgaatctcccggcagtgcttggaagtgtctgtggggtctcctcctcccagatccccaagatctgtgtcactggtcgattttgaactttaggtacatgtgttcttttcaaaaattcagagaatcgtcatgtgccacagaagctcagcctgggcttcagcaattgacaaaatttgaagaaatattaaacaaaaataacaaaaaaagaaacaaccttggccttaatgtcaataaaagggagttgtgtctgttaagtggtcttttcatagaatcgtccattagaaatgtgtgcctgtgtttagcttcctatcagtgggctttaaattgtataccgagtcatagatacgccactgataactaaaactagatcagggctggtgaagaaggttaggtgttttaggtacattccagctgtcataggaagatcacagaaatgaggaggctgttttcctctgattctcctcggccgaccacctgtccaatgctgctggtttcgcagagcgaccggttggagatgtctgaggaagaaagttcaaggtgtagggatagtgtgtttggaatttgactttccatttctgagacccaagggggcgtagatgtagtggcaagtgtggcgatgtttactctcccttcctgaaccgctctggtctgctcctcagagagggcagcggtgccaggcctcaggtcagggagaatgtctgtgacttagctgcagactaggagactgccctgctaactaattagcaagcagctttgacctcattaatatataaaagcagctctcagtatattccgtgtcgtgtgtgtgtgtggccaaagcccccaagggtggcaagtgccaccttcgctgtgctagagttgtgttgtaggaattagtcagggagttgttgtgaaaaaaaaaaccccagtgcttgtgagggaactcaaaatagttaccagaaaaataatatttgccaatatgacgtgtatattgctcagcacactctgtatctcctgtccttaaaatcctcttgtccccggcattctgacacactgggctgccgtccggtgtcaagccccggcgcaggcttgctcttcttttacaatgaaaggggtgaagagtgagggtctcacagttccttacctcaaagtccctttaggtccttctggtttggaggaagtggagcctccacgaactctctcttactccgaccattcaggcagcaaagtctctgcttacatcattttggttgtcaccttggggctgagtgagaagtcttttgtaaattaattcggcgtgtgctacatgagccataattattaacagaacaggaatatcagaaacgaagttgttgatcaggcccactgcgaccttcctttctatctcagggtttaaaactgtgaggaaggagaagtatgaaggaaggtagaaaatgctggtgggtctccgtgtttatgagtcacagattttgaaagctatcaggaaatgactagagtggatcctggcactgattccaactctttgccagctaatcttaacatttagcagaaagctctagcaacatgatcttaattgtatccagaggatttgccaatgtatgttcagtctctcaagatttggcattagtcagacatgttgatgctagccacaatttggatttctccatagaataatcatttatttttgcagatcaaataaatcagagtttacaatgcacaggggatcatttatttagcattcccttgctagaagcccgtgtgccaggcactgtgctagaagtggtgggcagtataaagaaatctgtctccacagccacacaaccagagggtgcacatgacttgatccctatgaccaagtcaagttggtgttgcccaaatcgcagtttgacataagggtcccacaggcttccccaccccccgcccccactcactgccccagggaccaacttcctaccctcacccaaggctttagaggacctgtagcatgtctttttcaacctgtcagtatccccttctgcttaacacacccactgagaaaaccctgtttgtagttcactttgactcttgaatgtgtcactttactggcaagagacttcctttgatttctactgtttacaaataaaactcagccagtctcattctatatcccaaacgtactgaatgaaactgattttggttccacaagcagtgtttgggtgttgccttcctgaaggtgaccaagcttccaaagctcgtcccactggcctctgtacatttccctgtggttctccgtccttccctggcgagggagctgggactgaagctttcccgctgtttccctgcctgcaaaagcagccccaagagctgcgcattggcttccctcagcaatctgtcctgtctgtgctcccattcggtccacatagctttctttgcctctctgaggcagacaggaagtgtctaattacgattttgtggcctgggttttgttgcataccacagattgtctatgtaacatgtagcgcacacctctcttggtgctatttcattcctgctgtaagagaatgacaaaaatattcatgtatagccaattgattgtgacgtgcttgtggtctgtgcttgctcagaaaaacaaacaaacaaacagtttttccaattataaataaatgctaaagacgaacacc

SEQ ID NO: 14055 - protein, 453 aa, Homo sapiens
  ref <308>: DATABASE ACCESSION NUMBER: SWISS-Prot / BAB47507
  ref <309>: DATABASE ENTRY DATE: 2002-10-01
NHKKKEEAGFSASIMAWPCITRACCIARFWNQLDKADIAVPLVFTKYSEATEHPGAPPQPPPPQQQAQPALAPPSARAVAIETQPAQGELDAVARATGPAPGPTGEREPAAGPGRSGPGPGLGSGSTSGPADSVMRQDYRAWKVQRPEPSCRPRSEYQPSDAPFERETQYQKDFRAWPLPRRGDHPWIPKPVQISAASQASAPILGAPKRRPQSQERWPVQAAAEAREQEAAPGGAGGLAAGKASGADERDTRRKAGPAWMVRRAEGLGHEQTPLPAAQAQVQATGPEAGRGRAAADALNRQIREEVASAVSSSYRNEFRAWTDIKPVKPIKAKPQYKPPDDKMVHETSYSAQFKGEASKPTTADNKVIDRRRIRSLYSEPFKEPPKVEKPSVQSSKPKKTSASHKPTRKAKDKQAVSGQAAKKKSAEGPSTTKPDDKEQSKEMNNKLAEAKE

SEQ ID NO: 14056 - DNA, 1312 bp, Rattus norvegicus; identical to SEQ ID NO: 1492
  ref <308>: DATABASE ACCESSION NUMBER: EMBL / AJ132230
  ref <309>: DATABASE ENTRY DATE: 1999-08-11

SEQ ID NO: 14057 - protein, 337 aa, Rattus norvegicus; identical to SEQ ID NO: 1493
  ref <308>: DATABASE ACCESSION NUMBER: SWISS-Prot / CAA10610
  ref <309>: DATABASE ENTRY DATE: 2001-10-16

SEQ ID NO: 14058 - DNA, 1279 bp, Homo sapiens
aaaactcctccaaaagcagctctcactatcagaaaacccaactacagttgtgaacgccttcattttctgcctgaggtctcagtccgtcggcccagactgaagtgcagtggcacaatcatagctcgctgcagcctcgaccttccaggcttaaacgattctcccacctcagcctctcgagttgctgggaccacaggtcactgtgcatggcatcatcctggccccctctagagctccaatcctccaaccagagccagctcttccctcaaaatgctacggcctgtgacaatgctccagaagcctgggacctgctgcacagagtgctgccaacatttatcatctccatctgtttcttcggcctcctagggaacctttttgtcctgttggtcttcctcctgccccggcggcaactgaacgtggcagaaatctacctggccaacctggcagcctctgatctggtgtttgtcttgggcttgcccttctgggcagagaatatctggaaccagtttaactggcctttcggagccctcctctgccgtgtcatcaacggggtcatcaaggccaatttgttcatcagcatcttcctggtggtggccatcagccaggaccgctaccgcgtgctggtgcaccctatggccagccggaggcagcagcggcggaggcaggcccgggtcacctgcgtgctcatctgggttgtggggggcctcttgagcatccccacattcctgctgcgatccatccaagccgtcccagatctgaacatcaccgcctgcatcctgctcctcccccatgaggcctggcactttgcaaggattgtggagttaaatattctgggtttcctcctaccactggctgcgatcgtcttcttcaactaccacatcctggcctccctgcgaacgcgggaggaggtcagcaggacaaggtgcgggggccgcaaggatagcaagaccacagcgctgatcctcacgctcgtggttgccttcctggtctgctgggccccttaccacttctttgccttcctggaattcttattccaggtgcaagcagtccgaggctgcttttgggaggacttcattgacctgggcctgcaattggccaacttctttgccttcactaacagctccctgaatccagtaatttatgtctttgtgggccggctcttcaggaccaaggtctgggaactttataaacaatgcacccctaaaagtcttgctccaatatcttcatcccataggaaagaaatcttccaacttttctggcggaattaaaacagcattgaacc

SEQ ID NO: 14059 - protein, 353 aa, Homo sapiens
MASSWPPLELQSSNQSQLFPQNATACDNAPEAWDLLHRVLPTFIISICFFGLLGNLFVLLVFLLPRRQLNVAEIYLANLAASDLVFVLGLPFWAENIWNQFNWPFGALLCRVINGVIKANLFISIFLVVAISQDRYRVLVHPMASRRQQRRRQARVTCVLIWVVGGLLSIPTFLLRSIQAVPDLNITACILLLPHEAWHFARIVELNILGFLLPLAAIVFFNYHILASLRTREEVSRTRCGGRKDSKTTALILTLVVAFLVCWAPYHFFAFLEFLFQVQAVRGCFWEDFIDLGLQLANFFAFTNSSLNPVIYVFVGRLFRTKVWELYKQCTPKSLAPISSSHRKEIFQLFWRN

SEQ ID NO: 14060 - DNA, 1312 bp, Rattus norvegicus; identical to SEQ ID NO: 1492
  ref <308>: DATABASE ACCESSION NUMBER: EMBL / AJ132230
  ref <309>: DATABASE ENTRY DATE: 1999-08-11

SEQ ID NO: 14061 - protein, 337 aa, Rattus norvegicus; identical to SEQ ID NO: 1493
  ref <308>: DATABASE ACCESSION NUMBER: SWISS-Prot / CAA10610
  ref <309>: DATABASE ENTRY DATE: 2001-10-16

SEQ ID NO: 14062 - DNA, 1279 bp, Homo sapiens; identical to SEQ ID NO: 14058

SEQ ID NO: 14063 - protein, 353 aa, Homo sapiens; identical to SEQ ID NO: 14059

SEQ ID NO: 14064 - DNA, 838 bp, Rattus norvegicus
  ref <308>: DATABASE ACCESSION NUMBER: EMBL / D10106
  ref <309>: DATABASE ENTRY DATE: 2000-02-01
ccgcggcctcgcctccctgccgagcttccagcgcctcgggacgcgatgaggacctgggcttgcctgctgctcctcggctgcggatacctcgcccatgccctggccgaggaagccgagataccccgggagttgatcgagcgactggctcgaagtcagatccacagcatccgggacctccagcgactcttggagatagactccgtaggggctgaggatgccttggagacaaacctgagagcccatgggtcccacactgttaagcatgtgccggagaagcggcctgtgcccatccgcagaagagaagtattgaggaagccattcccgcagtttgcaagaccaggacggtcatttacgagatacctcggagccaggtggacccccacatcggccaacttcttgatctggcccccatgtgtggaggtgaagcgctgcactggctgctgtaacaccagcagcgtcaagtgccagccctcaagggtccaccaccgcagtgtcaaggtggccaaagtggagtatgtcaggaagaagccaaaattgaaagaggtccaggtgaggttagaggagcacctggagtgcgcatgcgcgacctccaacctgaacccagaccatcgggaggaggagacggatgtgaggtgagatgagctggctgccctctcccgggacacggatgtacgtggcgtgtgacattcctgacatactatgtatggtgcttcattgccaatgtgcgtgcagtctttgttctcctccgtgaaaaactgtgtccgaggacaaagagacagtgtccgtttgttcagtgtgacatcaaagcagtactgtagcactcggagagacagtgaga

SEQ ID NO: 14065 - protein, 204 aa, Rattus norvegicus
  ref <308>: DATABASE ACCESSION NUMBER: SWISS-Prot / P28576
  ref <309>: DATABASE ENTRY DATE: 2002-06-15
MRTWACLLLLGCGYLAHALAEEAEIPRELIERLARSQIHSIRDLQRLLEIDSVGAEDALETNLRAHGSHTVKHVPEKRPVPIRRKRSIEEAIPAVCKTRTVIYEIPRSQVDPTSANFLIWPPCVEVKRCTGCCNTSSVKCQPSRVHHRSVKVAKVEYVRKKPKLKEVQVRLEEHLECACATSNLNPDHREEETGRRRESGKKRK

SEQ ID NO: 14066 - DNA, 2797 bp, Homo sapiens
  ref <308>: DATABASE ACCESSION NUMBER: Refseq / NM_002607
  ref <309>: DATABASE ENTRY DATE: 2001-08-17
acgcgcgccctgcggagcccgcccaactccggcgagccgggcctgcgcctactcctcctcctcctctcccggcggcggctgcggcggaggcgccgactcggccttgcgcccgccctcaggcccgcgcgggcggcgcagcgaggccccgggcggcgggtggtggctgccaggcggctcggccgcgggcgctgcccggccccggcgagcggagggcggagcgcggcgccggagccgagggcgcgccgcggagggggtgctgggccgcgctgtgcccggccgggcggcggctgcaagaggaggccggaggcgagcgcggggccggcggtgggcgcgcagggcggctcgcagctcgcagccggggccgggccaggcgttcaggcaggtgatcggtgtggcggcggcggcggcggcggccccagactccctccggagttcttcttggggctgatgtccgcaaatatgcagaattaccggccgggtcgctcctgaagccagcgcggggagcgagcgcggcggcggccagcaccgggaacgcaccgaggaagaagcccagcccccgccctccgccccttccgtccccaccccctacccggcggcccaggaggctccccggctgcggcgcgcactccctgtttctcctcctcctggctggcgctgcctgcctctccgcactcactgctcgccgggcgccgtccgccagctccgtgctccccgcgccaccctcctccgggccgcgctccctaagggatggtactgaatttcgccgccacaggagaccggctggagcgcccgccccgcgcctcgcctctcctccgagcagccagcgcctcgggacgcgatgaggaccttggcttgcctgctgctcctcggctgcggatacctcgcccatgttctggccgaggaagccgagatcccccgcgaggtgatcgagaggctggcccgcagtcagatccacagcatccgggacctccagcgactcctggagatagactccgtagggagtgaggattctttggacaccagcctgagagctcacggggtccacgccactaagcatgtgcccgagaagcggcccctgcccattcggaggaagagaagcatcgaggaagctgtccccgctgtctgcaagaccaggacggtcatttacgagattcctcggagtcaggtcgaccccacgtccgccaacttcctgatctggcccccgtgcgtggaggtgaaacgctgcaccggctgctgcaacacgagcagtgtcaagtgccagccctcccgcgtccaccaccgcagcgtcaaggtggccaaggtggaatacgtcaggaagaagccaaaattaaaagaagtccaggtgaggttagaggagcatttggagtgcgcctgcgcgaccacaagcctgaatccggattatcgggaagaggacacgggaaggcctagggagtcaggtaaaaaacggaaaagaaaaaggttaaaacccacctaagatgtgaggtgaggatgagccgcagccctttcctgggacatggatgtacatggcgtgttacattcctgaacctactatgtacggtgctttattgccagtgtgcggtctttgttctcctccgtgaaaaactgtgtccgagaacactcgggagaacaaagagacagtgcacatttgtttaatgtgacatcaaagcaagtattgtagcactcggtgaagcagtaagaagcttccttgtcaaaaagagagagagagagagagagagagaaaacaaaaccacaaatgacaaaaacaaaacggactcacaaaaatatctaaactcgatgagatggagggtcgccccgtgggatggaagtgcagaggtctcagcagactggatttctgtccgggtggtcacaggtgcttttttgccgaggatgcagagcctgctttgggaacgactccagaggggtgctggtgggctctgcagggcccgcaggaagcaggaatgtcttggaaaccgccacgcgaactttagaaaccacacctcctcgctgtagtatttaagcccatacagaaaccttcctgagagccttaagtggtttttttttttgtttttgttttgttttttttttttttgttttttttttttttttttttttttacaccataaagtgattattaagcttccttttactctttggctagctttttttttttttttttttttttttttttttaattatctcttggatgacatttacaccgataacacacaggctgctgtaactgtcaggacagtgcgacggtatttttcctagcaagatgcaaactaatgagatgtattaaaataaacatggtatacctacctatgcatcatttcctaaatgtttctggctttgtgtttctcccttaccctgctttatttgttaatttaagccattttgaaagaactatgcgtcaaccaatcgtacgccgtccctgcggcacctgccccagagcccgtttgtggctgagtgacaacttgttccccgcagtgcacacctagaatgctgtgttcccacgcggcacgtgagatgcattgccgcttctgtctgtgttgttggtgtgccctggtgccgtggtggcggtcactccctctgctgccagtgtttggacagaacccaaattctttatttttggtaagatattgtgctttacctgtattaacagaaatgtgtgtgtgtggtttgtttttttgtaaaggtgaagtttgtatgtttacctaatattacctgttttgtatacctgagagcctgctatgttcttcttttgttgatccaaaattaaaaaaaaaataccaccaac

SEQ ID NO: 14067 - protein, 211 aa, Homo sapiens [sequence omitted]

SEQ ID NO: 14068 - DNA, 3816 bp, Rattus norvegicus; identical to SEQ ID NO: 1635
  ref <308>: DATABASE ACCESSION NUMBER: EMBL / D12524
  ref <309>: DATABASE ENTRY DATE: 2000-04-29

SEQ ID NO: 14069 - protein, 978 aa, Rattus norvegicus; identical to SEQ ID NO: 1636
  ref <308>: DATABASE ACCESSION NUMBER: SWISS-Prot / BAA02094
  ref <309>: DATABASE ENTRY DATE: 2003-02-01

SEQ ID NO: 14070 - DNA, 5084 bp, Homo sapiens; identical to SEQ ID NO: 1637
  ref <308>: DATABASE ACCESSION NUMBER: Refseq / NM_000222
  ref <309>: DATABASE ENTRY DATE: 2000-10-31

SEQ ID NO: 14071 - protein, 976 aa, Homo sapiens [sequence omitted]

SEQ ID NO: 14072 - DNA, 4104 bp, Rattus norvegicus
  ref <308>: DATABASE ACCESSION NUMBER: EMBL / D13213
  ref <309>: DATABASE ENTRY DATE: 1999-09-20
tgaaaagaggccgcccggcggggcccgcaggcgatgcgcggcgccggtggcccccgcggccctcggggccccgctaagatgctgctgctgctggcgctggcgtgcgccagcccgttcccggaggaggtgccggggccgggcgcggtcggcgggggcacgggcggggcgcggccactcaacgtggcgcttgtcttctccggcccggcatatgcggcagaggcggcgcgcttgggcccggccgtggcagcggcagtgcgcagccccggcctggacgtacggcccgtggcgctggtgctcaacggctccgaccctcgcagccttgtgctgcagctctgcgacctgctgtcggggctgcgcgtgcacggcgtggtgttcgaggacgactcgcgcgcgcccgccgtcgcgcccattctcgacttcctgtccgcgcagacctcgctgcccatcgtagccgtgcacggcggcgccgcgctcgtgctcacacccaaggagaagggctccaccttcctgcagcttggctcctccacagagcaacagttgcaggtcatttttgaggtgctggaggagtacgactggacatcctttgtggcagtgaccacgcgtgccccaggccatcgggccttcttgtcatacatcgaggtgctgactgatggcagcctggtgggctgggagcatcgaggagcgctgacactggaccccggggcgggtgaggctgtactgggcgcacagctccgtagtgtcagtgcgcagatccgcctgctcttctgcgcccgcgaggaggcagagcctgttttccgggcagcggaagaggccggcctcactgggcctggctacgtctggttcatggtgggaccccagctggctggaggcgggggctccggggtccctggggagccccttcttctgccaggaggttccccactgcctgccgggctgtttgcagtgcgctctgctggctggcgtgacgacttggcacgtcgagtggctgctggtgtggcggtggtggccagaggtgcccaggccctgctgcgagactatggcttcctgcctgagctgggtcatgactgccgcacccagaatcgcacccaccgcggggagagtctgcacaggtacttcatgaacatcacctgggataaccgagactactccttcaatgaggatggctttctggtgaacccttcactggtggtcatctccctcaccagagacaggacatgggaagtggtgggcagctgggaacagcagaccctccgcctcaagtaccctctatggtcccgctatggccgcttcctgcagccagtggatgacacacagcacctcactgtggccacgctggaggagagaccctttgtcattgtagagcctgcagaccccatcagcggcacttgcatcagagactcggtcccctgccggagccagctcaaccgtacccacagccctccgcctgacgctccccgcccggagaagagatgctgcaagggtttctgcattgatattctgaagaggctggcgcacaccatcggtttcagctatgacctctacctggttaccaacggcaagcatggcaagaagatcgatggcgtctggaatggcatgattggtgaggtgttctatcagcgtgcggacatggccatcggctctctcaccatcaatgaggagcggtcagagatcgtggacttctccgtcccctttgtagagacaggcatcagcgtcatggtggcacgcagcaatggcactgtgtccccctctgccttcctcgagccctacagccctgctgtctgggtgatgatgttcgtcatgtgcctcaccgtggtcgccgtcacagttttcatctttgagtacctcagtcctgtgggctataaccgaagcctggccacgggcaaacgccctggtggctctaccttcaccattgggaaatccatctggctgctgtgggccctggtcttcaacaactccgtgccagtggagaatcctcggggcaccaccagcaagatcatggtgctggtgtgggccttcttcgcggtcatctttcttgccagctacacagccaatctggccgccttcatgatccaggaggagtacgtggacaccgtgtctgggctcagcgaccggaagttccagcgaccccaggagcaatacccacctctgaagtttggcacggtgcccaatgggtccacggaaaagaacatccggagcaactaccctgacatgcacagctacatggtgcgatacaaccagccgagagtggaggaggcactcacacagctcaaggcagggaaactggacgccttcatctatgacgcagcagtgctcaactacatggcccgcaaggatgagggctgcaagctggtcaccatcggctccggcaaggtcttcgccaccactggttatggcatcgccctacacaagggctcccgctggaagaggcccatcgacctggcgctgctgcagttcctgggggacgatgagattgagatgctggagcggctgtggctttcagggatctgccacaatgacaaaatcgaagtgatgagtagcaagctggatatcgacaacatggcaggtgtcttctacatgctccttgtggccatgggcctctccttgctggtcttcgcctgggaacatctggtgtactggcgcctgcggcattgcctgggtcccacccaccgcatggatttcctactggccttctccaggggtatgtacagctgctgcagcgccgaggctgctccaccgccggccaagcctccgccaccgcctcagccgctgcccagtcccgcatatcccgccgctcgcccgccccctggccccgcacccttcgtgccccgagagcgcgcagctgccgaccgctggcgccgagccaagggcacagggcccccggggggcgcagcgatagccgacggcttccaccgatactacggccccatcgagccacaggggctgggcctcggcgaggcacgcgcggcaccgagaggcgcagccggacgcccactgtccccacccaccacacagcccccgcagaagccaccaccttcctacttcgccatcgtgcgcgagcaggagccgaccgagcccccggccggcgccttccccggcttcccatctccgcctgcgccgcccgctgcggctgccgctgccgtcgggccgccactgtgtcgcctggctttcgaggacgaaagcccgcccgcaccctcgcgctggccgcgttcagatcccgagagccagcctctgttgggtgggggcgcgggcggcccgagcgcgggggccccaaccgcaccaccgccgcgccgtgccgcgccaccaccgtgcgcctacctggacctcgagccttcgccttcggactccgaggactcggagagcctgggcggagcatcgctcggtggcctggagccctggtggttcgccgacttcccctacccgtatgccgagcgcctcgggccgccgcccggccgctactggtcggtcgacaagctcgggggctggcgcgctggtagctgggactacctgcccccgcgcggaggccccgcgtggcactgccgccactgcgccagcctggagctgctaccgccaccgcgccacctcagctgctcgcacgacggcttagacggcggctggtgggcgcctccgcctccaccctgggccgcggggccacctccccggcgccgggcgcgctgtggttgtccgcgacctcacccacaccgcccccgggcctcgcaccgtgcgcccgccgccgcgccgcaccaccaccgacacaggcgcgcggccggtggctgggacttcccgccgcccgcgcccacctcgcgttcgctggaggacctgagctcccgcccctgcccaccgcatcgcaccggagacaccggggcggggacctgggcacacgcaggggctctgcgcatttctccagcctggagtccgaggtatgacgcggctccggcccccacccccacccccgccgccccctcggtcagcgcaggccacggcccgagggggcgcgctaagtggacaggaccctcatgggttgggaaggacagaaacggacctggccggaccccgcctggagcagcgtcctgcgcccccacccccttcgccttgggggaactatga

SEQ ID NO: 14073 - protein, 1323 aa, Rattus norvegicus
  ref <308>: DATABASE ACCESSION NUMBER: SWISS-Prot / BAA02500
  ref <309>: DATABASE ENTRY DATE: 2002-06-15
MRGAGGPRGPRGPAKMLLLLALACASPFPEEVPGPGAVGGGTGGARPLNVALVFSGPAYAAEAARLGPAVAAAVRSPGLDVRPVALVLNGSDPRSLVLQLCDLLSGLRVHGVVFEDDSRAPAVAPILDFLSAQTSLPIVAVHGGAALVLTPKEKGSTFLQLGSSTEQQLQVIFEVLEEYDWTSFVAVTTRAPGHRAFLSYIEVLTDGSLVGWEHRGALTLDPGAGEAVLGAQLRSVSAQIRLLFCAREEAEPVFRAAEEAGLTGPGYVWFMVGPQLAGGGGSGVPGEPLLLPGGSPLPAGLFAVRSAGWRDDLARRVAAGVAVVARGAQALLRDYGFLPELGHDCRTQNRTHRGESLHRYFMNITWDNRDYSFNEDGFLVNPSLVVISLTRDRTWEVVGSWEQQTLRLKYPLWSRYGRFLQPVDDTQHLTVATLEERPFVIVEPADPISGTCIRDSVPCRSQLNRTHSPPPDAPRPEKRCCKGFCIDILKRLAHTIGFSYDLYLVTNGKHGKKIDGVWNGMIGEVFYQRADMAIGSLTINEERSEIVDFSVPFVETGISVMVARSNGTVSPSAFLEPYSPAVWVMMFVMCLTVVAVTVFIFEYLSPVGYNRSLATGKRPGGSTFTIGKSIWLLWALVFNNSVPVENPRGTTSKIMVLVWAFFAVIFLASYTANLAAFMIQEEYVDTVSGLSDRKFQRPQEQYPPLKFGTVPNGSTEKNIRSNYPDMHSYMVRYNQPRVEEALTQLKAGKLDAFIYDAAVLNYMARKDEGCKLVTIGSGKVFATTGYGIALHKGSRWKRPIDLALLQFLGDDEIEMLERLWLSGICHNDKIEVMSSKLDIDNMAGVFYMLLVAMGLSLLVFAWEHLVYWRLRHCLGPTHRMDFLLAFSRGMYSCCSAEAAPPPAKPPPPPQPLPSPAYPAARPPPGPAPFVPRERAAADRWRRAKGTGPPGGAAIADGFHRYYGPIEPQGLGLGEARAAPRGAAGRPLSPPTTQPPQKPPPSYFAIVREQEPTEPPAGAFPGFPSPPAPPAAAAAAVGPPLCRLAFEDESPPAPSRWPRSDPESQPLLGGGAGGPSAGAPTAPPPRRAAPPPCAYLDLEPSPSDSEDSESLGGASLGGLEPWWFADFPYPYAERLGPPPGRYWSVDKLGGWRAGSWDYLPPRGGPAWHCRHCASLELLPPPRHLSCSHDGLDGGWWAPPPPPWAAGPPPRRRARCGCPRPHPHRPRASHRAPAAAPHHHRHRRAAGGWDFPPPAPTSRSLEDLSSCPRAAPTRRLTGPSRHARRCPHAAHWGPPLPTASHRRHRGGDLGTRRGSAHFSSLESEV

SEQ ID NO: 14074 - DNA, 4299 bp, Homo sapiens
  ref <308>: DATABASE ACCESSION NUMBER: Refseq / NM_000836
  ref <309>: DATABASE ENTRY DATE: 2001-02-03
ggacgccgggttccggtcctggcccccccgccatccccccaacagaacagggtcatgaaaagaggccgcccggcggggcccgcaggcgatgcgcggcgccggtggcccccgcggccctcggggccccgctaagatgctgctgctgctggcgctggcctgcgccagcccgttcccggaggaggcgccggggccgggcggggccggtgggcccggcggcggcctcggcggggcgcggccgctcaacgtggcgctcgtgttctcggggcccgcgtacgcggccgaggcggcacgcctgggcccggccgtggcggcggcggtgcgcagcccgggcctagacgtgcggcccgtggcgctggtgctcaacggctcggacccgcgcagcctcgtgctgcagctctgcgacctgctgtcggggttgcgcgtgcacggcgtggtcttcgaagacgactcgcgcgcgcccgccgtcgcgcccatcctcgacttcctgtcggcgcagacctcgctgcccatcgtggccgtgcacggcggcgccgcgctcgtgctcacgcccaaggagaagggctccaccttcctgcagctgggctcttccaccgagcaacagcttcaggtcatctttgaggtgctggaggagtatgactggacgtcctttgtagccgtgaccactcgtgcccctggccaccgggccttcctgtcctacattgaggtgctgactgacggtagtctggtgggctgggagcaccgcggagcgctgacgctggaccctggggcgggcgaggccgtgctcagtgcccagctccgcagtgtcagcgcgcagatccgcctgctcttctgcgcccgagaggaggccgagcccgtgttccgcgcagctgaggaggctggcctcactggatctggctacgtctggttcatggtggggccccagctggctggaggcgggggctctggggcccctggtgagccccctcttctgccaggaggcgcccccctgcctgccgggctgtttgcagtgcgctcggctggctggcgggatgacctggctcggcgagtggcagctggcgtggccgtagtggccagaggtgcccaggccctgctgcgtgattatggtttccttcctgagctcggccacgactgtcgcgcccagaaccgcacccaccgcggcgagagtctgcataggtacttcatgaacatcacgtgggataaccgggattactccttcaatgaggacggcttcctagtgaacccctccctggtggtcatctccctcaccagagacaggacgtgggaggtggtgggcagctgggagcagcagacgctccgcctcaagtacccgctgtggtcccgctatggtcgcttcctgcagccagtggacgacacgcagcacctcacggtggccacgctggaggaaaggccgtttgtcatcgtggagcctgcagaccctatcagcggcacctgcatccgagactccgtcccctgccggagccagctcaaccgaacccacagccctccaccggatgccccccgcccggaaaagcgctgctgcaagggtttctgcatcgacattctgaagcggctggcgcataccatcggcttcagctacgacctctacctggtcaccaatggcaagcacggaaagaagatcgatggcgtctggaacggcatgatcggggaggtgttctaccagcgcgcagacatggccatcggctccctcaccatcaacgaggagcgctccgagatcgtggacttctccgtccccttcgtggagaccggcatcagcgtcatggtggcgcgcagcaatggcacggtgtccccctcggccttcctcgagccctacagccccgccgtgtgggtgatgatgttcgtcatgtgcctcactgtggtcgccgtcactgttttcatcttcgagtacctcagtcctgttggttacaaccgcagcctggccacgggcaagcgccctggcggttcaaccttcaccattgggaaatccatctggctgctctgggccctggtgttcaataattcggtgcccgtggagaacccccggggaaccaccagcaaaatcatggtgctggtgtgggccttcttcgccgtcatcttcctcgccagctacacagccaacctggccgccttcatgatccaggaggagtacgtggatactgtgtctgggctcagtgaccgcaagttccagaggccccaggagcagtacccgcccctgaagtttgggaccgtgcccaacggctccacggagaagaacatccgcagcaactatcccgacatgcacagctacatggtgcgctacaaccagccccgcgtagaggaagcgctcactcagctcaaggcagggaagctggacgccttcatctacgatgctgcagtgctcaattacatggcccgcaaggacgagggctgcaagcttgtcaccatcggctccggcaaggtcttcgccacgacaggctatggcatcgccctgcacaagggctcccgctggaagcggcccatcgacctggcgttgctgcagttcctgggggatgatgagatcgagatgctggagcggctgtggctctctgggatctgccacaatgacaaaatcgaggtgatgagcagcaagctggacatcgacaacatggcgggcgtcttctacatgctcctggtggccatgggcctgtccctgctggtcttcgcctgggagcacctggtgtactggcgcctgcggcactgcctggggcccacccaccgcatggacttcctgctggccttctccaggggcatgtacagctgctgcagcgctgaggccgccccaccgcccgccaagcccccgccgccgccacagcccctgcccagccccgcgtaccccgcgccggggccggctcccgggcccgcacctttcgtgccccgcgagcgcgcctcagtggaccgctggcgccggaccaagggcgcggggccgccggggggcgcgggcctggccgacggcttccaccgctactacggccccatcgagccgcagggcctaggcctcggcctgggcgaagcgcgcgcggcaccgcggggcgcagccgggcgcccgctgtccccgccggccgctcagcccccgcagaagccgccggcctcctatttcgccatcgtacgcgacaaggagccagccgagccccccgccggcgccttccccggcttcccgtcgccgcccgcgccccccgccgccgcggccaccgccgtcgggccgccactctgccgcttggccttcgaggacgagagcccgccggcgcccgcgcggtggccgcgctcggaccccgagagccaacccctgctggggccaggcgcgggcggcgcggggggcacggggggcgcaggcggaggagccccggccgctccgcccccgtgctgcgccgcgccgcccccgtgcccttacctcgatctcgagccgtcgccgtcggactcggaggactcggagagcctgggcggcgcgtcgctgggcggcctggatccctggtggttcgccgacttcccttacccgtatgccgagcgcctcgggccgccgcccggccgctactggtcggtcgacaagctcgggggctggcgcgccgggagctgggactacctgcccccgcgcagcggtccggccgcctggcactgtcggcactgcgccagcctggagctgctgccgccgccgcgccatctcagctgctcgcacgatggcctggacggcggctggtgggcgccaccgcctccaccctgggccgccgggcccctgccccgacgccgggcccgctgcgggtgcccgcggtcgcacccgcaccgcccgcgggcctcgcaccgcacgcccgccgctgccgcgccccaccaccacaggcaccggcgcgccgctgggggctgggacctcccgccgcccgcgcccacctcgcgctcgctcgaggacctcagctcgtgccctcgcgccgcccctgcgcgcaggcttaccgggccctcccgccacgctcgcaggtgtccgcacgccgcgcactgggggccgccgctgcccacagcttcccaccggagacaccggggcggggacctgggcacccgcaggggctcggcgcacttctctagcctcgagtccgaggtatgacgcggccccgggggccccaccgcccccttggtcagcgcaggccacggcccgagggggcgcccgcagtggacaggacccgcgtgggttgggaaggaaagcagtggaactggccggaccccgcctggagcagcgtcctgcgccccctggttctggaggaaccgcaagccggagaggatttggtccctcaactatcacccagg

SEQ ID NO: 14075 - protein, 1336 aa, Homo sapiens
  ref <308>: DATABASE ACCESSION NUMBER: Refseq / NP_000827
  ref <309>: DATABASE ENTRY DATE: 2001-02-03
MRGAGGPRGPRGPAKMLLLLALACASPFPEEAPGPGGAGGPGGGLGGARPLNVALVFSGPAYAAEAARLGPAVAAAVRSPGLDVRPVALVLNGSDPRSLVLQLCDLLSGLRVHGVVFEDDSRAPAVAPILDFLSAQTSLPIVAVHGGAALVLTPKEKGSTFLQLGSSTEQQLQVIFEVLEEYDWTSFVAVTTRAPGHRAFLSYIEVLTDGSLVGWEHRGALTLDPGAGEAVLSAQLRSVSAQIRLLFCAREEAEPVFRAAEEAGLTGSGYVWFMVGPQLAGGGGSGAPGEPPLLPGGAPLPAGLFAVRSAGWRDDLARRVAAGVAVVARGAQALLRDYGFLPELGHDCRAQNRTHRGESLHRYFMNITWDNRDYSFNEDGFLVNPSLVVISLTRDRTWEVVGSWEQQTLRLKYPLWSRYGRFLQPVDDTQHLTVATLEERPFVIVEPADPISGTCIRDSVPCRSQLNRTHSPPPDAPRPEKRCCKGFCIDILKRLAHTIGFSYDLYLVTNGKHGKKIDGVWNGMIGEVFYQRADMAIGSLTINEERSEIVDFSVPFVETGISVMVARSNGTVSPSAFLEPYSPAVWVMMFVMCLTVVAVTVFIFEYLSPVGYNRSLATGKRPGGSTFTIGKSIWLLWALVFNNSVPVENPRGTTSKIMVLVWAFFAVIFLASYTANLAAFMIQEEYVDTVSGLSDRKFQRPQEQYPPLKFGTVPNGSTEKNIRSNYPDMHSYMVRYNQPRVEEALTQLKAGKLDAFIYDAAVLNYMARKDEGCKLVTIGSGKVFATTGYGIALHKGSRWKRPIDLALLQFLGDDEIEMLERLWLSGICHNDKIEVMSSKLDIDNMAGVFYMLLVAMGLSLLVFAWEHLVYWRLRHCLGPTHRMDFLLAFSRGMYSCCSAEAAPPPAKPPPPPQPLPSPAYPAPGPAPGPAPFVPRERASVDRWRRTKGAGPPGGAGLADGFHRYYGPIEPQGLGLGLGEARAAPRGAAGRPLSPPAAQPPQKPPASYFAIVRDKEPAEPPAGAFPGFPSPPAPPAAAATAVGPPLCRLAFEDESPPAPARWPRSDPESQPLLGPGAGGAGGTGGAGGGAPAAPPPCCAAPPPCPYLDLEPSPSDSEDSESLGGASLGGLDPWWFADFPYPYAERLGPPPGRYWSVDKLGGWRAGSWDYLPPRSGPAAWHCRHCASLELLPPPRHLSCSHDGLDGGWWAPPPPPWAAGPLPRRRARCGCPRSHPHRPRASHRTPAAAAPHHHRHRRAAGGWDLPPPAPTSRSLEDLSSCPRAAPARRLTGPSRHARRCPHAAHWGPPLPTASHRRHRGGDLGTRRGSAHFSSLESEV

SEQ ID NO: 14076 - DNA, 2023 bp, Rattus norvegicus
  ref <308>: DATABASE ACCESSION NUMBER: EMBL / D13912
  ref <309>: DATABASE ENTRY DATE: 1999-01-21
attcggatgcagagcatcagaggcccagctagagggacaacacagaggagtaatttgctgacagacctgcagggatggacctgctttcagctctcacactggaaacctgggtcctcctggcagtcgtcctggtgctcctctacggatttgggacccgcacacatggacttttcaagaaacaggggattcctgggcccaaacctctgcctttttttggcactgtgctgaattactatatgggtttatggaaattcgatgtggagtgccataaaaagtatggaaaaatatgggggttgtttgatggtcaaatgcctctgtttgccatcacggacacagaaatgatcaagaatgtgctagtgaaggaatgcttttctgtcttcacaaaccggcgggattttggcccagtggggattatggggaaagccatctctgtatctaaggatgaggagtggaagagatatagagccttgctgtcccccacgttcaccagtggaagactcaaggagatgttccctgtcatcgaacagtatggagacattttggtaaaatacttgaggcaagagaaaggcaaacctgtccctgtgaaagaagtgtttggtgcctacagcatggatgtgatcaccagcacatcatttggagtgaatgttgattccctcaacaacccgaaggatccttttgtggagaaagccaagaagctcttaagaattgatttttttgatccgttgttcttgtcagtagtactctttccattcctcacgccagtatatgagatgttaaacatctgcatgttcccaaaagattcaatagaatttttcaaaaaatttgtgtacagaatgaaggaaacccgcctggattctgtgcagaagcatcgagtggattttcttcagctgatgatgaatgctcataatgattctaaagacaaagaatctcatacagccctatccgatatggagatcacagcccagtcaatcatttttatttttgctggatatgaacccaccagcagcacactttcctttgtcctgcattccctggccactcacccagatacacagaagaaactgcaggaggagatcgacagggctctgcccaataaggcacctcccacctatgatactgtgatggaaatggaatacctggatatggtgttgaatgaaaccctcagattgtatccaattggtaatagacttgagagagtctgtaaaaaagatgttgaaatcaatggtgtgtttatgcccaaagggtcagtggtcatgattccatcttatgctcttcaccgtgatccacagcactggccagagcctgaggaatttcgcccagaaaggttcagcaaggagaacaagggcagcattgatccttatgtatatctgccctttggaaatggacccaggaactgcattggcatgaggtttgctctcatgaatatgaaactcgctctcactaaagttctgcaaaacttctccttccagccttgtaaggaaacacagatacctctgaaattaagcagacaaggacttcttcaaccaacaaaacccattattctaaaggttgtgccacgggatgaaatcataactggatcatgattttccctcaaggagttctgctgaattcttcagaaatgtggtgtctaagaacaccagaccctttaatttatgtcatgaataaaattcagatgaaattagggcttaatcgactttgttttgattcggtacatctttgctctttctcagtgtctacaatgtacccatctaatataaaggaaatgacaagtcagtgacagaacaggaacttaacctttggtgattctcatgggactacctccatccacatctggttgtctctgttaatttcttttgatagtaaccttgtctctgtaatttgatcaagaatttttcatgaaaatgtgaactattgtgacaactttaattgtagatttggtatcagatgttttagatgcattattctacactaaatgttacatggaaaaaatgtgaataaacacttctttaaaaatccccatttt

SEQ ID NO: 14077 - protein, 151 aa, Rattus norvegicus
  ref <308>: DATABASE ACCESSION NUMBER: SWISS-Prot / AAB59730
  ref <309>: DATABASE ENTRY DATE: 2003-02-01
MEYLDMVLNETLRLYPIGNRLERVCKKDVEINGVFMPKGSVVMIPSYALHRDPQQWPDPEEFRPERFSKENKGSIDPYVYLPFGNGPRNCIGMRFALMNMKLALTKVLQNFSFQPCKETQIPLKLSRQGLLQPTKPIILKVVPRDEIITGS

SEQ ID NO: 14078 - DNA, 2036 bp, Homo sapiens
  ref <308>: DATABASE ACCESSION NUMBER: EMBL / M14096
  ref <309>: DATABASE ENTRY DATE: 1999-07-02
gcacagcaaagagcaacacagagctgaaaggaagactcagagcagagagataagtaaggaaagtagtgatggctctcatcccagacttggccatggaaacctggcttctcctggctgtcagcctggtgctcctctatctatatggaacccattcacatggactttttaagaagcttggaattccagggcccacacctctgccttttttgggaaatattttgtcctaccataagggcttttgtatgtttgacatggaatgtcataaaaagtatggaaaagtgtggggcttttatgatggtcaacagcctgtgctggctatcacagatcctgacatgatcaaaacagtgctagtgaaagaatgttattctgtcttcacaaaccggaggccttttggtccagtgggatttatgaaaagtgccatctctatagctgaggatgaagaatggaagagattacgatcattgctgtctccaaccttcaccagtggaaaactcaaggagatggtccctatcattgcccagtatggagatgtgttggtgagaaatctgaggcgggaagcagagacaggcaagcctgtcaccttgaaagacgtctttggggcctacagcatggatgtgatcactagcacatcatttggagtgaacatcgactctctcaacaatccacaagacccctttgtggaaaacaccaagaagcttttaagatttgattttttggatccattctttctctcaataacagtctttccattcctcatcccaattcttgaagtattaaatatctgtgtgtttccaagagaagttacaaattttttaagaaaatctgtaaaaaggatgaaagaaagtcgcctcgaagatacacaaaagcaccgagtggatttccttcagctgatgattgactctcagaattcaaaagaaactgagtcccacaaagctctgtccgatctggagctcgtggcccaatcaattatctttatttttgctggctatgaaaccacgagcagtgttctctccttcattatgtatgaactggccactcaccctgatgtccagcagaaactgcaggaggaaattgatgcagttttacccaataaggcaccacccacctatgatactgtgctacagatggagtatcttgacatggtggtgaatgaaacgctcagattattcccaattgctatgagacttgagagggtctgcaaaaaagatgttgagatcaatgggatgttcattcccaaagggtgggtggtgatgattccaagctatgctcttcaccgtgacccaaagtactggacagagcctgagaagttcctccctgaaagattcagcaagaagaacaaggacaacatagatccttacacatacacaccctttggaagtggacccagaaactgcattggcatgaggtttgctctcatgaacatgaaacttgctctaatcagagtccttcagaacttctccttcaaaccttgtaaagaaacacagatccccctgaaattaagcttaggaggacttcttcaaccagaaaaacccgttgttctaaaggttgagtcaagggatggcaccgtaagtggagcctgaattttcctaaggacttctgctttgctcttcaagaaatctgtgcctgagaacaccagagacctcaaattactttgtgaatagaactctgaaatgaagatgggcttcatccaatggactgcataaataaccggggattctgtacatgcattgagctctctcattgtctgtgtagagtgttatacttgggaatataaaggaggtgaccaaatcagtgtgaggaggtagatttggctcctctgcttctcacgggactatttccaccacccccgagttagcaccattaactcctcctgagcttgataagagaatcaacatttctcaataatttcctccacaaattattaatgaaaataagaattattttgatggctctaacaatgacatttatatcacatgttttctctggagtattctataagttttatgttaaatcaataaagaccactttacaaaagt

SEQ ID NO: 14079 - protein, 502 aa, Homo sapiens
  ref <308>: DATABASE ACCESSION NUMBER: PIR / A29815
  ref <309>: DATABASE ENTRY DATE: 2000-07-28
ALIPDLAMETWLLLAVSLVLLYLYGTHSHGLFKKLGIPGPTPLPFLGNILSYHKGFCMFDMECHKKYGKVWGFYDGQQPVLAITDPDMIKTVLVKECYSVFTNRRPFGPVGFMKSAISIAEDEEWKRLRSLLSPTFTSGKLKEMVPIIAQYGDVLVRNLRREAETGKPVTLKDVFGAYSMDVITSTSFGVNIDSLNNPQDPFVENTKKLLRFDFLDPFFLSITVFPFLIPILEVLNICVFPREVTNFLRKSVKRMKESRLEDTQKHRVDFLQLMIDSQNSKETESHKALSDLELVAQSIIFIFAGYETTSSVLSFIMYELATHPDVQQKLQEEIDAVLPNKAPPTYDTVLQMEYLDMVVNETLRLFPIAMRLERVCKKDVEINGMFIPKGWVVMIPSYALHRDPKYWTEPEKFLPERFSKKNKDNIDPYIYTPFGSGPRNCIGMRFALMNMKLALIRVLQNFSFKPCKETQIPLKLSLGGLLQPEKPVVLKVESRDGTVSGA

SEQ ID NO: 14080 - DNA, 1673 bp, Rattus norvegicus; identical to SEQ ID NO: 1699
  ref <308>: DATABASE ACCESSION NUMBER: EMBL / D13962
  ref <309>: DATABASE ENTRY DATE: 2000-04-27

SEQ ID NO: 14081 - protein, 494 aa, Rattus norvegicus
  misc_feature (1)..(494): Xaa=Unknown amino acid
MGTAKVTPSLVFAVTVATIGSFQFGYNTGVINAPETIIKDFLNYTLEERLEDLPREGLLTTLWSLCVAIFSVGGMIGSFSVGLFVNRFGRRNSMLLVNLIAILGGCLMGFAKIAESVEMLILGRLIIGIFCGLCTGFVPMYIGEVSPTALRGAFGTLNQLGIVVGILVAQVFGLDFILGSEELWPGLLGLTIIPAILQSAALPFCPESPRFLLINRKEEDQATEILQRLWGTPDVIQEIQEMKDESIRMSQEKQVTVLELFKSPSYFQPLLISVVLQLSQQFSGINAVFYYSTGIFQDAGVQEPIYATIGAGVVNTIFTVVSLFLVERAGRRTLHMIGLGGMAVCSVFMTISLLLKDEYEAMSFVCIVAILVYVAFFEIGPGPIPWFIVAELFSQGPRPAAMAVAGCSNWTSNFLVGMFFPSAAAYLGAYVFIIFAAFLVFFLIFTSFKVPETKGRTFEDITRAFEGQAHSGKGSAGVELNSMQPVKETPGNAX

SEQ ID NO: 14082 - DNA, 3915 bp, Homo sapiens; identical to SEQ ID NO: 1701
  ref <308>: DATABASE ACCESSION NUMBER: EMBL / M20681
  ref <309>: DATABASE ENTRY DATE: 1999-07-02

SEQ ID NO: 14083 - protein, 496 aa, Homo sapiens; identical to SEQ ID NO: 1702
  ref <308>: DATABASE ACCESSION NUMBER: SWISS-Prot / P11169
  ref <309>: DATABASE ENTRY DATE: 2002-06-15

SEQ ID NO: 14084 - DNA, 3417 bp, Rattus norvegicus; identical to SEQ ID NO: 1801
  ref <308>: DATABASE ACCESSION NUMBER: EMBL / D16817
  ref <309>: DATABASE ENTRY DATE: 2000-02-01

SEQ ID NO: 14085 - protein, 915 aa, Rattus norvegicus; identical to SEQ ID NO: 1802
  ref <308>: DATABASE ACCESSION NUMBER: SWISS-Prot / BAA04092
  ref <309>: DATABASE ENTRY DATE: 2002-06-15

SEQ ID NO: 14086 - DNA, 6122 bp, Homo sapiens; identical to SEQ ID NO: 1705
  ref <308>: DATABASE ACCESSION NUMBER: Refseq / NM_000843
  ref <309>: DATABASE ENTRY DATE: 2000-10-31

SEQ ID NO: 14087 - protein, 877 aa, Homo sapiens; identical to SEQ ID NO: 1706
  ref <308>: DATABASE ACCESSION NUMBER: Refseq / NP_000834
  ref <309>: DATABASE ENTRY DATE: 2000-10-31

SEQ ID NO: 14088 - DNA, 2749 bp, Rattus norvegicus; identical to SEQ ID NO: 2334
  ref <308>: DATABASE ACCESSION NUMBER: EMBL / D90401
  ref <309>: DATABASE ENTRY DATE: 2000-04-29

SEQ ID NO: 14089 - protein, 442 aa, Rattus norvegicus; identical to SEQ ID NO: 2335
  ref <308>: DATABASE ACCESSION NUMBER: SWISS-Prot / BAA14397
  ref <309>: DATABASE ENTRY DATE: 2002-06-15

SEQ ID NO: 14090 - DNA, 2749 bp, Rattus norvegicus; identical to SEQ ID NO: 2334
  ref <308>: DATABASE ACCESSION NUMBER: EMBL / D90401
  ref <309>: DATABASE ENTRY DATE: 2000-04-29

SEQ ID NO: 14091 - protein, 442 aa, Rattus norvegicus; identical to SEQ ID NO: 2335
  ref <308>: DATABASE ACCESSION NUMBER: SWISS-Prot / BAA14397
  ref <309>: DATABASE ENTRY DATE: 2002-06-15

SEQ ID NO: 14092 - DNA, 1173 bp, Rattus norvegicus
  ref <308>: DATABASE ACCESSION NUMBER: EMBL / E01050
  ref <309>: DATABASE ENTRY DATE: 2000-09-02
tcgcaccagctgctggtgccacccccagaggccctgagcaagcccctgtcaattcctaagaggctcctgttgggtccgggaccctccaacctggctcctcgtgtgctagcagctggaagtctgaggatgattggccacatgcaaaaagagatgtttcagatcatggatgagatcaagcagggcatccagtatgtgttccagaccaggaaccccctcacactggttgtcagcggcgagggcctggctcagcataaaccagtgttgtcaggacattgtgccatggagactgccctgctgttcctgacccacggggagtcatccactttcaacctcctggagcctggggactcctttggtgtgctgcagcccctggatggtttcgggcttgtgggaaccaatggcatctgggggatagagctctgccacaggtatcagtgcctactccgggctgcagagatcgctgagcggattggactggtggactcggtggcatcattgggcggagcccgtgtgcaccagatgatcaagaagcctgtccctatctacatggaccaacaaggcatcggagaacattacacactgcaggaggtggaggacatcttgtactctggctctcagaaggtcctgaatgccccaccagggatctccctcatcgagcagggcctggagaattcctggcggcgttccttcaacgacaaggccaaatccaaagtccacagggaggctacagcacatctgcacaagtactcccggaagacaaagccagtctccttctgcctgcgggagttgggcttaaagttcttttacacagacatcacttatttgtccaagttggtgaaggacccggaaatccggctacctacatggggctgtgagggcaagaccagagtaattatcaccaccgtgaccgtgcctgccggctaccatcatacgttgcctgtcatcagcttatacaactggagggacatcgtcagctacgtgctgtgcctgagggagagcctagcactcatttcagaccacttcaacattgaaatctctggtggtcttgggccctctgaggataaggtgctgcggattggcctcctgggctacaacgccaccacagagaatgcggaccgtgtagcggaggccctgagggaggccctgcaacattgtcctaagaataaattgtga

SEQ ID NO: 14093 - protein, 392 aa, Rattus norvegicus
  ref <308>: DATABASE ACCESSION NUMBER: Refseq / NP_085914
  ref <309>: DATABASE ENTRY DATE: 2002-11-05
MGSHQLLVPPPEALSKPLSIPKRLLLGPGPSNLAPRVLAAGSLRMIGHMQKEMFQIMDEIKQGIQYVFQTRNPLTLVVSGSGHCAMETALFNLLEPGDSFLVGTNGIWGIRAAEIAERIGARVHQMIKKPGEHYTLQEVEEGLAQHKPVLLFLTHGESSTGVLQPLDGFGELCHRYQCLLLVDSVASLGGVPIYMDQQGIDILYSGSQKVLNAPPGISLISFNDKAKSKVYSRKTKPVSFYTDITYLSKLWGCEGKTRVIHHTLPVISLYCLRESLALISEQGLENSWRRHREATAHLHKCLRELGLKFFVKDPEIRLPTITTVTVPAGYNWRDIVSYVLDHFNIEISGGLGPSEDKVLRIGLLGYNATTENADRVAEALREALQHCPKNKL

SEQ ID NO: 14094 - DNA, 1600 bp, Homo sapiens; identical to SEQ ID NO: 3674
  ref <308>: DATABASE ACCESSION NUMBER: Refseq / NM_000030
  ref <309>: DATABASE ENTRY DATE: 2002-11-05

SEQ ID NO: 14095 - protein, 392 aa, Homo sapiens; identical to SEQ ID NO: 3675
  ref <308>: DATABASE ACCESSION NUMBER: Refseq / NP_000021
  ref <309>: DATABASE ENTRY DATE: 2002-11-05

SEQ ID NO: 14096 - DNA, 1173 bp, Rattus norvegicus; identical to SEQ ID NO: 14092
  ref <308>: DATABASE ACCESSION NUMBER: EMBL / E01050
  ref <309>: DATABASE ENTRY DATE: 2000-09-02

SEQ ID NO: 14097 - protein, 392 aa, Rattus norvegicus; identical to SEQ ID NO: 14093
  ref <308>: DATABASE ACCESSION NUMBER: Refseq / NP_085914
  ref <309>: DATABASE ENTRY DATE: 2002-11-05

SEQ ID NO: 14098 - DNA, 1600 bp, Homo sapiens; identical to SEQ ID NO: 3674
  ref <308>: DATABASE ACCESSION NUMBER: Refseq / NM_000030
  ref <309>: DATABASE ENTRY DATE: 2002-11-05

SEQ ID NO: 14099 - protein, 392 aa, Homo sapiens; identical to SEQ ID NO: 3675
  ref <308>: DATABASE ACCESSION NUMBER: Refseq / NP_000021
  ref <309>: DATABASE ENTRY DATE: 2002-11-05

SEQ ID NO: 14100 - DNA, 2121 bp, Rattus norvegicus
  ref <308>: DATABASE ACCESSION NUMBER: EMBL / E13557
  ref <309>: DATABASE ENTRY DATE: 2000-09-02
cgcgctctgaacccgtcgtctgaaccctctctgaaccttcctgaagctggaagatttcaccctgatggctgactcaaaaccactcagaaccctggatggggaccctgtgcctgtggaggctttgctccgggacgtgtttgggattgtcgtagatgaggccattcggaaggggaccaatgcctctgagaaggtctgcgaatggaaggagcctgaagagctcaagcagctgctggacttggagctgcagagccagggcgagtctagggagcggatcctggagcgctgccgggctgtgattcattacagtgtcaagactggtcacccccggttcttcaaccagctcttctcaggattagatccccatgctctggccgggcgcatcattacggagagcctcaataccagccagtacacatatgagattgcccccgtgtttgtgctcatggaagaggaggtgctgaagaaactccgtgcccttgtgggctggaacactggggatggggtcttctgtcctggtggttccatctctaacatgtacgccataaacctggcccgctttcagcgctacccagactgcaagcagaggggcctccgggccctgccacccttggccctcttcacttcaaaggagtgccactactccatcaccaagggagctgcttttctgggacttggcaccgacagtgtccgagtggtcaaggctgatgagagagggaagatgatccctgaggatctggagaggcagatcagtctggcagaggctgagggctcggtgccatttctggtcagtgccacctctggtaccaccgtgctaggggcctttgaccccctggatgcaattgccgatgtttgccagcgtcacgggctgtggttacacgtggatgccgcctggggtgggagcgtcctgctgtcccggacacacaggcatctcctggatgggatccagagggctgactccgtggcctggaaccctcacaagcttctcgccgcggggctgcagtgctctgctcttcttctccgggacacctcgaacctgctcaagcgctgccacgggtcccaggccagctacctcttccagcaagacaagttctacaacgtggctctggacaccggagacaaggtggtgcagtgtggccgccgcgtggactgtctgaagctgtggctcatgtggaaggcgcagggtgggcaagggctggagtggcgcatcgaccaggcctttgctctcactcggtacttggtggaggagataaaaaagcgggaaggatttgagttggtcatggagcccgagttcgtcaacgtgtgcttctggtttgtgcctcccagcctgcgggggaagaaggagagcccagattacagccagaggctgtctcaggtggcccctgtgctcaaggagcgcatggtgaagaagggaaccatgatgatcggctaccagccccatgggacccgggccaacttcttccgaatggtggtggccaaccccatactggtccaggccgatatagacttccttctgggcgaggctggagcgtctgggccaggacctgtgagctgcttcctctctctgccccacccaagctctgcataagctcctgggttcccaaaagcgacctttctaggaaacagtggccttgactgtgtgagcccccacacactaactctcctagctaagtattggctgccagacggtgtctaagcacactacagtctgttcttacgaaatgtgcttcttttaagtcggtcatagtggtacacaccgttaataccagcactggggaggcagaggcagacacaagcagatctcttgagtttgaggccagcctggtctacagagctggcctacacagaaaaaaaacctgtctcaaaaaaaaagaaaggaaggaagaaagaaaggaaaagaaagaaatatttttcattaagattatgtctataaaaaattgttattaatatgagagatatggtacgatgtattaagaaagctagatatgggggttggggatttagctcagtggtagagcccttgcctaggaagcgcaaggccctgggttcggtccccagcttcgaaaaaaaggaaccacaaaaaaaacggcccgctctagaactagtggatcccccggcctgcag

SEQ ID NO: 14101 - protein, 493 aa, Rattus norvegicus; identical to SEQ ID NO: 3838
  ref <308>: DATABASE ACCESSION NUMBER: Refseq / NP_068518
  ref <309>: DATABASE ENTRY DATE: 2000-11-08

SEQ ID NO: 14102 - DNA, 2121 bp, Rattus norvegicus; identical to SEQ ID NO: 14100
  ref <308>: DATABASE ACCESSION NUMBER: EMBL / E13557
  ref <309>: DATABASE ENTRY DATE: 2000-09-02

SEQ ID NO: 14103 - protein, 493 aa, Rattus norvegicus; identical to SEQ ID NO: 3838
  ref <308>: DATABASE ACCESSION NUMBER: Refseq / NP_068518
  ref <309>: DATABASE ENTRY DATE: 2000-11-08

SEQ ID NO: 14104 - DNA, 2012 bp, Rattus norvegicus
  ref <308>: DATABASE ACCESSION NUMBER: EMBL / L07380
  ref <309>: DATABASE ENTRY DATE: 2002-08-09
gagtagcagagatgcagcttggtggcatcgcagagacagcctgggagggaagggccacggctctttggggcggactacaggcaccactgccatggacagcctgttgtgggctacctgggtcctctgcttgctgaacctgtggggagttgcactgggtcacctccacctagaatgtgacttcatcactcagctgagagacgatgagcttgcatgccttcaggcggcagaggggaccaacaactcgtccatgggatgccctgggacctgggatgggctgctgtgctggcccccaactggctctggccagtgggtctccctcccctgccctgaattcttctctcattttggctcagacccaggggctgtgaaaagggactgcaccatcacgggttggtctgatcccttcccaccatatcccgtggcctgtcctgtgcccttggaactgctaacagaggagaagtcttacttctccacggtgaagatcatctacaccacaggccacagcatctccattgtagccctctgcgtggctattgccatcctggttgctctcaggaggctccactgccccaggaactacatccacacgcagctgtttgctactttcatcctcaaggccagtgctgtgttcctgaaggatgctgctgtcttccagggtgatagcacggaccactgcagcatgtccactattctgtgcaaggtctctgtggccgtctcacattttgccaccatgaccaacttcagctggctgctggcagaagccgtctacctgagctgtctgttggcctggacatctcctaggtccaaaccagctttctggtggctggttctcgctggctggggactccctgtgctatgcactggtacgtgggtgggctgcaaactggcttttgaggacactgcgtgctgggacctagacgacagctccccctactggtggatcatcaaagggcccatagtcctctctgttggggtgaactttgggctgtttctcaatataatttcgatcctgctgaggaagctggggcctgcacaaggcggcttacacacacgggctcagtactgcaactatttattaccctggtcctgtcctcttcctcaagttcctagagagagaacagatctgggcccttcgtcccatgagattacagtacaggaaagtggcacacgaaactgccagttaccatggcggctttccaaatcaacacttctccttatcccgctgtttggaattcattacatcatcttcaacttcctgcctgacagtgctggccttggcatccgtctacccctggagctgggactggggtccttccagggttttgttgttgctgtcctctactgcttcctcaatcaagaggtgaggacggagatttcacgcaaatggtatggccatgaccctgaacttctgccagctcggcggacctgcactgagtggaccacacctccccgatcgagagtgaaggtgctcacctctgagtgctaggccagccatcacaaaggccgagccccaaaaccctgcactcaaactgccatgccaccaagggcaacaaggtcctcccttccgttctcattctctgcatctgctttctctaggtccctgtataccaacctccgactttctcagttcctgtatgcccccatctgttctttcttcctatctagggctattgcccaaggcccagggaaaccaataaacttgtacatgagtgatctgcagttgagtcaatgtggctctgaaggggagctcttgtcagcagccattatttgcacttccggtgcattcctcatcccttggctgcagctgcctcattgccatttgtctctatatgaattctcatgtttattatttttaaaatcactcttttgtctcaacccccactccccttcccctcctcccgcaggcaaagatgtgaacctttgcttctctgtcttgcaagtgtggagtgtaccacacgtctgtatttggatgtaaataagtgctatctgttatgtgtcataaaaaaaaaaaa

SEQ ID NO: 14105 - protein, 423 aa, Rattus norvegicus
  ref <308>: DATABASE ACCESSION NUMBER: Refseq / NP_036982
  ref <309>: DATABASE ENTRY DATE: 2000-11-01
MDSLLWATWVLCLLNLWGVALGHLHLECDFITQLRDDELACLQAAEGTNNSSMGCPGTWDGLLCWPPTGSGQWVSLPCPEFFSHFGSDPGAVKRDCTITGWSDPFPPYPVACPVPLELLTEEKSYFSTVKIIYTTGHSISIVALCVAIAILVALRRLHCPRNYIHTQLFATFILKASAVFLKDAAVFQGDSTDHCSMSTILCKVSVAVSHFATMTNFSWLLAEAVYLSCLLASTSPRSKPAFWWLVLAGWGLPVLCTGTWVGCKLAFEDTACWDLDDSSPYWWIIKGPIVLSVGVNFGLFLNIICILLRKLGPAQGGLHTRAQYWRLSKSTLLLIPLFGIHYIIFNFLPDSAGLGIRLPLELGLGSFQGFVVAVLYCFLNQEVRTEISRKWYGHDPELLPARRTCTEWTTPPRSRVKVLTSEC

SEQ ID NO: 14106 - DNA, 2012 bp, Rattus norvegicus; identical to SEQ ID NO: 14104
  ref <308>: DATABASE ACCESSION NUMBER: EMBL / L07380
  ref <309>: DATABASE ENTRY DATE: 2002-08-09

SEQ ID NO: 14107 - protein, 423 aa, Rattus norvegicus; identical to SEQ ID NO: 14105
  ref <308>: DATABASE ACCESSION NUMBER: Refseq / NP_036982
  ref <309>: DATABASE ENTRY DATE: 2000-11-01

SEQ ID NO: 14108 - DNA, 400 bp, Rattus norvegicus; identical to SEQ ID NO: 2866
  ref <308>: DATABASE ACCESSION NUMBER: EMBL / L11035
  ref <309>: DATABASE ENTRY DATE: 2000-03-04

SEQ ID NO: 14109 - DNA, 387 bp, Homo sapiens; identical to SEQ ID NO: 2867
  ref <308>: DATABASE ACCESSION NUMBER: EMBL / AF327018
  ref <309>: DATABASE ENTRY DATE: 2001-11-03

SEQ ID NO: 14110 - DNA, 209 bp, Rattus norvegicus
  ref <308>: DATABASE ACCESSION NUMBER: EMBL / L14002
  ref <309>: DATABASE ENTRY DATE: 2000-03-04
cagatactctcgacctcttacatttggagagttttgagcagacaggaagaagacggagcctgggagcagctgttctccaatagtcaaattaagactgttcctctctgagctctgtacttcaaccagcacctttaggcagaagccatcaaatcagaaatgtctgttaataattaaagtctatgattgccaccaaaaaaaaaaaaaaaaaa

SEQ ID NO: 14111 - DNA, 5297 bp, Rattus norvegicus
  ref <308>: DATABASE ACCESSION NUMBER: EMBL / L15556
  ref <309>: DATABASE ENTRY DATE: 2001-03-01
gaattccgccgcgccgcaaacaggctcttacaggcgcgcacacagacacgcgcgcgcgcacacagcggggttcccggaggcggcggtggccgcatccccagcagcgactcgcctcgaagtgacaggagcctgctggctagtttctctgtgagtgctgaaaaccatttgagaggattctcaacaaagcaccctggggtctgtgcacaggattcgatcagctagacctcccttgctgctgcacctaaccatctggtcttgaacaccatcatggccaaaccttacgaatttaactggcagaaggaggtaccctctttcttgcaagaaggagcagtttttgacagatatgaagaggaatctttcgtgtttgagcccaactgcctcttcaaagtggatgaattcggcttcttcctgacctggaagagtgaaggcaaggaaggacaagtgctagaatgttccctcatcaacagcattcggctggcagccataccaaaggatcccaaaatcctggctgctctcgagtctgttggaaaatctgaaaatgatctggaagggcggatattgtgtgtctgcagcggcacggatctggtgaatattggcttcacttacatggtggctgaaaacccagaaataactaagcaatgggtagaaggcctgagatcaatcattcacaacttcagggcaaacaacgtcagtccgatgacatgcctcaagaaacactggatgaaactggcctttctgaccaacacaagtggcaaaatcccagtgaggagtattactagaaccttcgcatcagggaaaacagaaaaggtgatctttcaagcactcaaggaattaggtctccccagtggaaagaatgatgaaattgaacctgctgcatttacctatgaaaagttctatgaactgacacagaagatttgtcctcggacagatatagaagatctttttaaaaaaatcaatggagacaaaactgattatttaacggtagaccaattagtgagctttctaaacgaacatcagcgagatcctcggctgaatgaaattttattcccgttttatgatgctaaaagagcaatgcagatcattgagatgtatgaacctgatgaagagttgaagaaaaaaggcctcatatccagtgatggattctgcagatatctcatgtcagatgaaaatgcccccgtcttcctagatcgcttagaactttaccaggagatggaccaccccctggcccattacttcatcagttcctctcacaacacctatctcaccggccggcagtttggcggaaagtcttcagtggaaatgtaccgacaagtcctcctggctggttgcaggtgtgtggaacttgactgttgggatggaaaaggtgaagatcaggaaccaataataactcacggaaaagcaatgtgtacagacatcctttttaaggatgtaatccaggccatcaaggaaacagcgtttgtcacatcagaatatcctgtaattctctcctttgaaaaccactgcagcaaatatcaacagtaccagatgtccaagtattgtgaagatctatttggggatcttctgttgaaacaagcacttgagtcacatccacttgaaccagggaggctcttgccatctcctaatgacctcaaaagaaaaatactcatcaaaaataaaaggctgaagcctgaagttgaaaaaaaacagctggaggctttgaaaagcatgatggaggctggagaatcagctgccccggccagcatcttggaagatgacaatgaggaggaaatagaaagcgcagctgatcaagaggaagaagcccaccctgaatacaagtttggaaatgaactttctgccgatgacttcagtcacaaggaagcggttgcaaacagcgtcaagaagggcctggtcaccgtagaagatgagcaggcatggatggcatcttataaatacgtaggtgctaccacgaatatccatccgtacttgtccacgatgatcaactatgcacagcctgtgaagtttcaaggtttccatgtggctgaagagcgcaacattcattataacatgtcttcttttaacgagtcggttggccttggctacttgaagacgcacgcgattgagtttgtaaattacaataagcgacaaatgagccgcatttaccccaagggagggcgagttgattccagtaattacatgcctcagattttctggaacgctggttgccagatggtttcactgaactatcaaaccccagatttagcgatgcaattgaatcaaggaaaatttgagtataacggatcctgcggatacctcctcaagccagacttcatgagacggcctgatcggacatttgatcccttctctgaaacccctgtggacggggttattgcagccacatgctcagtgcaggttatatcagggcagttcctgtcagataagaagatcggcacatacgtggaagtcgatatgtacgggctgcccaccgacaccatacggaaggagttccgaacccgcatggttatgaacaatggactcaacccagtttacaatgaagaatcgttcgtgtttcggaaggtgatcctgcctgacctggctgtcctgagaatcgctgtgtacgacgacaacaacaagctcattggccagaggatccttcctctggatggcctccaggcaggttaccgacacatctccctgagaaatgagggaaacaaaccgttatcactgccaacaattttctgcaatatcgttcttaaaacatatgtgcctgatggattgggagatattgtggatgctctatccgatccaaagaaattcctttcaatcacagagaagagagcagaccaattgagagcaatgggcattgaaactagtgacatagcagatgtgcccagtgacacttccaaaaatgacaagaaaggcaaggccaacccagccaaagcgaatgtaacccctcagagcagctctgagctcagaccaaccaccacagctgccctgggatctggccaggaagccaagaaaggtattgaacttatccctcaagtgaggatagaagatttaaagcaaatgaaggcttacttgaagcatttaaagaaacaacaaaaggagttaaactctttaaagaagaaacacgcaaaggagcacagtaccatgcagaagttacactgcacacaagtggacaaaatcgtggcccagtatgacaaggagaagtcgactcatgagaaaatcctagagaaggccatgaagaagaaggggggaagtaattgccttgaaataaaaaaagaaacagaaattaagattcagaccctgacatcggatcacaaatctaaggtcaaggagattgtggcgcagcacacaaaggagtggtcagaaatgatcaacacgcacagcgccgaggagcaggaaatccgggacctgcacctgagccagcagtgtgagctgctgaggaagctgctcatcaacgctcatgagcagcagacccagcagctgaagctctcccatgacagggaaagcaaagagatgcgagcccatcaggctaagatttctatggaaaatagcaaagccatcagtcaagataaatctatcaagaataaggcagaacgggagaggcgagtcagggagttgaacagcagcaacactaagaagtttctagaagaaagaaagagactggcaatgaagcagtcgaaagaaatggatcagctgaaaaaggtccagctggagcacctagaattcctagagaaacagaatgagcaggcgaaggagatgcagcagatggtgaaattggaagccgagatggaccgcagaccagcaacagtagtatgaaactccagaatgcaaactgaagctggaagaccatagaacaccagaggatcacgcccagcttcagaggacagactccatggacaaaagctgttttcttttgtttttcttttatgtgtagacacggtgtaacctgaaaccacatggactggggatgaccaaatgttcttctacttaacaatttgactattgaatttctttggccaaccaaaagtagctatgtacacacacacacacacacacacacacacacacacacacacacacagaaatcccctattcctgacaggcagagttgaaccataatccacaacttaaacatgttggctaggggacagcatcacaagccagtgggcttggtgataacaactctgctttgtggtgcattaggacatgttcgagctgctgctggaaaaggaaaattagtgcattagtactttaatggcaagcgcatgcactagacgaaacaactccgtctacagtccattagcagaagtggtggtctgctatacaaatcactttgcagaactttctacacctaagttacctcatgagtaagtgccatgtctttaccatgccataagatgctaacttcctgtaaatgttgcagaatttgttaggacaatagagacacacaaaacggtgtacctgtgccaagctcatcagtgcgccaagggggactcagcaggctcgtttcggacagtttacagctgactctgctttgtaggaagtgcttctgcagatgcctcatgctgcaattcactacacactatcaggagggtggagtggctattggcaaatgtttgtaaatgtgaccatgtacaaagtatttatactccttaattctcatggttatagcgcaaagtcatctaaacattaccacacgacaagactagtaaacaggaatcatagatgttttgcatgatgcacaagcaccaattatgactaacccattgagacacagttaacctaacaccaaataaataccggttaagtcaatgtatggcacagaatattatttgactatcaagacttttagcataatgaaaaaagtctatatatatgtgtatatgaattatgtgggcattcttgatacttctagtttgaaaaaatacattaatttaattttacacaaaaatatttatgcagattttcagactttcatatcaggaaataacctttttatgtctgttaaatatccaaacgatttgctaccgtgttcatctgcatggtcttctcacctgctgtagttgccttgcaggtggtgcataaagtggacgggtgggatgagtcctgctgccccaacccagaggagcgtgcggagacccggtagcctaggagtcagattcctgattttaggatgcaaaacgccaacttaattgttgtatatggttgtacaaatagattctgtgtgttcctctgaggagggcagagaagagtatgataccatgaaggctgaaattcaacgtacaacttctctaataaaaaaaaaaaaaaaaaaa

SEQ ID NO: 14112 - protein, 1175 aa, Rattus norvegicus; identical to SEQ ID NO: 601
  ref <308>: DATABASE ACCESSION NUMBER: SWISS-Prot / Q9QW07
  ref <309>: DATABASE ENTRY DATE: 2002-06-15

SEQ ID NO: 14113 - DNA, 3707 bp, Homo sapiens; identical to SEQ ID NO: 602
  ref <308>: DATABASE ACCESSION NUMBER: EMBL / L41349
  ref <309>: DATABASE ENTRY DATE: 1999-07-02

SEQ ID NO: 14114 - protein, 1175 aa, Homo sapiens; identical to SEQ ID NO: 603
  ref <308>: DATABASE ACCESSION NUMBER: SWISS-Prot / Q15147
  ref <309>: DATABASE ENTRY DATE: 2002-06-15

SEQ ID NO: 14115 - DNA, 3115 bp, Rattus norvegicus
  ref <308>: DATABASE ACCESSION NUMBER: EMBL / L16995
  ref <309>: DATABASE ENTRY DATE: 2000-03-04
gaattccggtccgcagcctaggggcggggcgcggacgacggagccatggattgcacatttgaagacatgcttcagctcatcaacaaccaagacagtgacttccctggcctatttgatgccccctatgctgggggtgagacaggagacacaggccccagcagccctggtgccagctctcctgagagcttctcttctcctgcttctctgggctcctctctggaagccttcctgggaggacccaaggtgacacctgcacccttgtcccctccaccatcggcacccactgctgtaaagatgtacccgtccgtgccccccttctcccctgggcctggaatcaaagaggagccagtgccactcaccatcctgcagcccccagcaccacagccatcgccagggaccctgttgcctccgagcttccctcctccacctgtgcagctcagccctgctcctgtgctggggtactcaagcctgccttccggcttctcaggaacccttcctgggaacacccagcagacgccatctagcctgccactgggctccacgccaggaatctcgcccacccccttacacacccaggtccagagctcggccgcccagcagccgccgccagcctcagcagcccctagaatgagcactgtggcctcacagatccagcaggtccccgttgtactgcagccacacttcatcaaggcagactcgctgctgctgacagctgtaaagacagacacaggagccacaatgaagaccgcaggcatcaacaccctggctcctgcgacagccgtgcaggcaggccccttgcagaccctggtgagtggagggaccatcctggccacagtcccactggtggtggacacagacaaactgcccatccaccgactagcagctggtggcaaggccctgggctcagctcagagccgtggtgagaagcgcacagcccacaatgccattgagaagcgctaccgttcctctatcaatgacaagattgtggagctcaaggacctggtggtgggcactgaggcaaagctgaataaatctgctgtcttgcgcaaggccatcgactacatccgcttcttacagcacagcaaccagaaactcaagcaggagaacctgaccctgcgaagtgctcacaaaagcaaatcactgaaagacctggtgtcagcttgtggcagtggaggaggcacagatgtgtctatggagggcatgaaacctgaagtggtagaaacgctgacccctccaccctcagacgccggctcaccctcccagagtagccccttgtccttgggcagcagaggcagcagcagtggtggcagtgactctgagcccgacagcccagcctttgaggataaccaggtgaaagcccagcggctgccttcacatagccgaggcatgctggacccgtcccgcctggccctgtgtgtactggtcttcctgtgtctgacctgcaacccattggcctcactgtttggctggggcatcctcactccctctgatgcttcgggtgtgcaccgtagttctgggcgcagcatgctggaggccgagagcagagatggctctaattggacccagtggttgctgccacccctagtctggctggccaatggactactagtgttggcctgcttggctcttctctttgtctacggggaacctgtgaccaggccacactccggcccggctgtacacttctggagacatcgcaaacaagctgacctggatttggcccggggagattttgcccaggccgctcaacagctgtggctggccttgcaagccctgggccggcccctgcccacctcaaacctggatctggcctgcagcctgctttggaacctcgtccgccacctgctgcagcgtctttgggtgggccgctggctggcaggccaggctgggggcctgcagagggactacaggctgagaaaggatgctcgtgccagtgcccgagatgcggctgtcgtctaccataagctgcaccagctgcatgccatgggcaagtacacaggaggccatcttgttgcttctaacctggcactgagtgcccttaacctggctgagtgtgcaggagatgctatatccatggcaacactggcagagatctacgtggcagctgccctaagggtcaaaaccagcctccccagagccttgcacttcttgacacgtttcttcctaagtagtgcccgccaggcctgcctggcacagagtggtgcagtgcctcttgccatgcagtggctctgccaccctgtaggtcaccgtttcttcgtggatggggactgggctgtacacggtgccccccaggagagtctgtacagcgtggctgggaacccagtggatccactggcccaggtgacccgactattctgtgaacatctcctggagcgagcattgaactgtatcgctcagcccagcccaggggcagctgatggacacagggagttctcagatgcccttggatatctacagttgctaaatagctgttctgacgctgtcggagctcctgcgtgcagcttctctgtcagttccagcatggctaccaccactggcacagacccagtggccaagtggtgggcctcactgacagccgtggtgatccactggctgaggcgggatgaggaggcagctgaacgcttatacccactggtagagcacattccccaagtgctgcaggaaactgagagacccttcccagggcagctctgtactccttcaaggctgcccgggctctgctggaccacagaaaggtggaatccagcccagccagcctggccatctgtgagaaggccagtgggtactgcgggacagcttagcctctacatcaactgccagttccattgacaaggccgatgcagctgctcctgtgtgatctacttcttgtggcccgcaccagcctatgcggcgccaacagtcagcagcttcagcccagggagctcacggtaccagcaatggaccccaggcctctgctctggagctgcgtggtttccaacatgacctgagcagcctgaggcgcttggcacagagcttcggcctgctatgaggagggtcttcctacatgaggccacagctcggctgatggcaggagcaagtcctgcccggacacaccagctcctggaccgcggaattc

SEQ ID NO: 14116 - DNA, 3678 bp, Rattus norvegicus
  ref <308>: DATABASE ACCESSION NUMBER: EMBL / L26293
  ref <309>: DATABASE ENTRY DATE: 2000-03-04
gttccaatgtatatatctcattttacttatttccttttctgtcatattgggctatttcctgcctctttggaagtatagttaaatttgtgctgctgcagaagccctgtatgcaagcctagtccgctcttcttctgatgtgtcttacgtagggggtcctcaaagccccacagagctgctggactggtaagatgcctgttgtgattcctaggaggttcactgagcaagcatttggaagttcctgacttagaattccatgcttagtgtgtataatttctgtatcccttgggatatagctattagactgaaatatttcagtgaattttaccaacttctatatttttacgtgacagaaaaatgatgtgctttttcatgtcttataatagagcctgaacactcaatattcgcctgtggtaatttgattatttaaagaaagtatattactaactcagatatgtgttctgccaagccaagttccacattctggagattttcctaagtaagcagtcataagacccccttgaagtgatttgtgacttttgtgcaaatagagttatggtgttaatgttccaaataatgtccttaaaagcaggggtttcacccatgactcagcgacatcagtcacactaacggagatgagccatgactgcccatggtttaaagtcctgaacgccccctccgtactgcttgtccttggtctaaggattgggaagagtcagggctacttccagccagaccgctctctagggttattagtcacggctgtattatagggaacaaggtatctagtgttgcagatgcactggggacatagtatagggatttaaactatgcagtagagagattttagtgtaagttcagaattgtgaataatggtatcactcgagtttactgaaatgttggtagcattcgtggtttgccagtcataagtgtgcctggtttcagttcgtcactttggatatctctcaactgtttgggcactaaagtgcagttatgagtagtacatcatctgaagaccaaatggatgggaataaagtctatgccaggacaagcctggacacaccgtggtggtcatagctggactgcgggaaggacaggatgagcctggaactctttagagtaagaagtcagagtgtgtgtgacgtgatgtgcctgcatcacaggcactgtttgactctgcaactgggcagacctcaggtaatggagacagtaacattgtagcttattgaataaaacacaaatctgtaaataaggaaatttggggggatggcatgaaattagtggcgaagaatagtatgtttatcttaccacccaaaatatctcaacagaaaagacctgtcattaaaagattgttttaaaagaaaatacctgttaattttaaaaggtgacggtatcatggagaaatctgagcagtcactacctgaatcatagggtcaaatcaaaatcctgtgccaccttatagaataccatttttactaaagatacatggctttagatgtacattagaaaaaccataggtaaatattgtctatagaactgctggcctgagagcatcagatgcatcaagacaaggcaagactgaaatcctagtccagattgagtgcagccagtcagaagtgcagtctgtattccttggaagtgctgtatgtgtgtgggtttcaaggacatgattgttcagttgtgatttagttaaggaaatactcttgcttccggctctatacaccaacattagatgtgatgaagcctaatcgcagtaaatgcttctagagagatgatgtttttgtagtgtcgttacagcttttctgtagccaggtgctttagcttgttttatgatgaatcaggaaaaaaagtttatgtttctagctaatacaagatcagtgtcgtgtgaaaacacagaaaataggactcagacacactctgtgaaaatgtccaaagactgagtacctcatgggacacttgagtgagattctcagctcatcctcctggctcagttctagtcactgtttctccccacagtctataaggcccatgtgacctttatgagaatcttgattgtgtagcaagagcgagctcacagattctagtgtctgactagagaaccagctgtgaagatagctgtttgggttgcctgaggattgtttttaaagatttatgtatttcatgtggattagtactctatctgtgtgtgtatataactgctagacgaaggcattggatcccattacagatagatggttgtgagccaccatgtgggttgctgggatttggaactcaggacctctggaagagcagccagtgctcttaaccactgaaccaactctctaacccttaccttagtagtgtggctatctatcaaaataaagttttattaaaattactttcttccaggtggcaatgatggtcctttctataatgtttgtttacaattgtcactctattaaaaaagagtgggaacattctgagatctgttttcccaccttggaaatttaatccttgtccactagtaacactggttaaactaactcagtacatgggtgagatgcttttatttaactcgtgtccactgaaacccgctatactttgtttgtcattgtgtaggaacaaccctggctgtcctataattcagagatccacctacctctgccttcagagtgctaagattaaaggtgtgtgccaccaccgcctggcttcaagttagattttttatttcttgtgtatgcacttttcccacttatattacaagtttctagctctgtgcaaaacatgaagttgtttatggatgtgagctgatgtttgtgcacttgtctggagcctggaaactgcttccatacgttctcattggggtctctaccacaggcctgtggaataacagtaggtttttgttttttgttttttgtttttttcttgttttaccgaataaaaactggagacttagaaacatgtatctgatggttgttttaataaattagatggcaaaactcaaggctttggaaagtataattgtatacagttgccctttgtattgggatatgtacttaatggtttgtcgaagagacaattccttgttatcagcagtgatgtgcccttttcttatcctcagtccttcctgccccagaaggagctttggaactgagacatttattctgtgaaaacacctagttaaaggaacaccacatgcatggtgaagtcatgcatatgaagtcagttgatgaattgaaggaagcctgtctttatttgacctgtaaactgtctccagacggccaggtcccactataaacagaggtgcctaaaacctggatgtttccccctttgctggtctcaaactctgtgtatctagaaggactttgaacttcatgttcaccttgctcccacctactgagtgctgggggcaagggtcccaggcccaatccaccagggctttgcttgtgctcagcaaattctcccaacttagccacagtcccaggccccagactaaagagctctccagtgcactgtgttcattcctgagtcctaagggtgcagctatgcgatacaccaaccctttccgttttaactggctgtaattctaaatttagggtttttgttgagcagaattaagagtgttgaaatgttctctatgtagtttctgtatatgtcttcatatttaccaatataaacataaaaataaaatatatgaaatat

SEQ ID NO: 14117 - DNA, 8048 bp, Rattus norvegicus; identical to SEQ ID NO: 3288
  misc_feature (1)..(8048): n=a, c, g or t
  ref <308>: DATABASE ACCESSION NUMBER: EMBL / M13100
  ref <309>: DATABASE ENTRY DATE: 2000-03-04

SEQ ID NO: 14118 - DNA, 8048 bp, Rattus norvegicus; identical to SEQ ID NO: 3288
  misc_feature (1)..(8048): n=a, c, g or t
  ref <308>: DATABASE ACCESSION NUMBER: EMBL / M13100
  ref <309>: DATABASE ENTRY DATE: 2000-03-04

SEQ ID NO: 14119 - DNA, 8048 bp, Rattus norvegicus; identical to SEQ ID NO: 3288
  misc_feature (1)..(8048): n=a, c, g or t
  ref <308>: DATABASE ACCESSION NUMBER: EMBL / M13100
  ref <309>: DATABASE ENTRY DATE: 2000-03-04

SEQ ID NO: 14120 - DNA, 2452 bp, Rattus norvegicus
  ref <308>: DATABASE ACCESSION NUMBER: EMBL / M61725
  ref <309>: DATABASE ENTRY DATE: 2000-03-04
cggaggcgcatcggcactgcctggttctgggggctggggtagggaagagtggggctcactcctacacccaccgatgaagtctgtgagcctcctgatccggtcttgctgagagtgtgggcctatgcccctcccatgtgggaggtgggatagaaagtccctttcctcagcctctctgagtgggtttggtatctcttcgaaagggtgaggtggctttgaccccgggttgcccgccagcgcgaccgaggaggtggctggacagctggagaatgaacggagaagccgactgtcccacagacctggaaatggccgcccccaaaggccaagaccgctggtcccaggaagatatgctaactttgctggaatgcatgaagaacaaccttccatccaatgacagctccaagttcaagaccacagagtcgcatatggactgggaaaaagtcgcatttaaggatttttcaggagatatgtgcaagctcaaatgggtggagatttctaacgaggtaaggaagttccgtactttgacagaattgatccttgatgctcaggaacatgttaaaaacccttacaaaggcaaaaaactcaagaaacacccggattttccaaagaaacctctcaccccctacttccgcttcttcatggagaagcgggccaagtacgcgaaactccaccctgagatgagcaacctggacctgactaagatcctgtctaagaaatacaaggagcttccagagaagaagaagatgaaatatattcaggacttccagagggagaaacaggagttcgagcgaaacctggcccgattcagggaggatcaccctgaccttatccagaatgccaagaagtcggacatccccgagaagcccaaaactccccagcaactgtggtacacccatgagaagaaggtgtatctcaaagtgcggccggatgagattatgcgtgattatatccagaagcaccctgagctaaacatcagcgaggaaggtatcaccaagtctaccctcactaaggccgaacgccagctcaaggacaaatttgatggacgacccaccaagccacctccgaacagctactccctgtactgtgcagagctcatggcaaacatgaaggatgtgcccagcacagagcgcatggtgctatgcagccagcagtggaagctgctctcccagaaggaaaaggatgcttatcacaagaagtgtgaccagaaaaagaaagattatgaagtggagctgctgcgtttccttgagagcttgccagaggaagagcagcagcgggtcctgggagaggagaagatgttgaacatcaataagaagcagaccaccagtccagcctccaagaagccttcacaggaaggtggcaaaggtggttcggagaagcccaagcggcctgtgtctgccatgttcatcttctcagaggagaagagaaggcagcttcaggaggaacgacctgagctctcagaaagtgagctgacccgcctgctggcccgcatgtggaacgacttgtccgagaagaagaaggctaaatataaggcccgggaggccgcgctgaaggcacagtccgagaggaagcctggcggagagcgtgaagataggggcaagttgccagagtcgcccaagagagctgaggagatctggcagcagagtgtcatcggagactatctggcccgctttaagaatgaccgggtgaaagccttgaaagccatggagatgacgtggaacaacatggagaagaaggagaagctcatgtggattaagaaggctgcagaagaccaaaaacgatatgagagagagttaagtgagatgcgggcccctccagctgctacgaactcttccaagaagatgaagttccagggagagcccaagaaaccgcctatgaacggttaccagaagttctcccaggagctgctgtccaatggggaactaaatcacctgccactcaaggagcgcatggtggagatcggcagccgttggcagcgcatctcccagagccagaaggagcactataagaagctggctgaggaacagcagaggcagtacaaggtgcacttggacctctgggtcaagagcctatctccccaggaccgcgcagcatacaaagaatacatctccaataaacgtaagaacatgactaagcttcgaggcccaaaccccaagtctagccggaccaccctgcagtccaagtcggagtcagaggaagacgacgatgaggaagatgatgatgatgatgacgaggaggaagaagaagatgatgagaacggcgactcgtccgaggacggtggggattcttctgagtcgagcagtgaagatgaaagcgaggacggggatgagaatgaggatgatgacgacgacgaggatgacgacgaggatgacgatgaggatgaagacaacgagtctgagggcagtagctccagctcctcatcttcaggggactcctcagactctgactccaactgagg

SEQ ID NO: 14121 - protein, 764 aa, Rattus norvegicus
  ref <308>: DATABASE ACCESSION NUMBER: PIR / B40439
  ref <309>: DATABASE ENTRY DATE: 1997-09-08
MNGEADCPTDLEMAAPKGQDRWSQEDMLTLLECMKNNLPSNDSSKFKTTESHMDWEKVAFKDFSGDMCKLKWVEISNEVRKFRTLTELILDAQEHVKNPYKGKKLKKHPDFPKKPLTPYFRFFMEKRAKYAKLHPEMSNLDLTKILSKKYKELPEKKKMKYIQDFQREKQEFERNLARFREDHPDLIQNAKKSDIPEKPKTPQQLWYTHEKKVYLKVRPDATTKEVKDSLGKQWSQLSDKKRLKWIHKALEQRKEYEEIMRDYIQKHPELNISEEGITKSTLTKAERQLKDKFDGRPTKPPPNSYSLYCAELMANMKDVPSTERMVLCSQQWKLLSQKEKDAYHKKCDQKKKDYEVELLRFLESLPEEEQQRVLGEEKMLNINKKQTTSPASKKPSQEGGKGGSEKPKRPVSAMFIFSEEKRRQLQEERPELSESELTRLLARMWNDLSEKKKAKYKAREAALKAQSERKPGGEREDRGKLPESPKRAEEIWQQSVIGDYLARFKNDRVKALKAMEMTWNNMEKKEKLMWIKKAAEDQKRYERELSEMRAPPAATNSSKKMKFQGEPKKPPMNGYQKFSQELLSNGELNHLPLKERMVEIGSRWQRISQSQKEHYKKLAEEQQRQYKVHLDLWVKSLSPQDRAAYKEYISNKRKNMTKLRGPNPKSSRTTLQSKSESEEDDDEEDDDDDDEEEEEDDENGDSSEDGGDSSESSSEDESEDGDENEDDDDDEDDDEDDDEDEDNESEGSSSSSSSSGDSSDSDSN

SEQ ID NO: 14122 - DNA, 2489 bp, Homo sapiens
  ref <308>: DATABASE ACCESSION NUMBER: EMBL / X56687
  ref <309>: DATABASE ENTRY DATE: 1997-04-03
ctccgccgcgggagggagctgcggctgtgccggccgagcgggggagggcgccgccactcagagccagggagggagccgctggagcggaagcccggaggccgcgctgcgccggggtgaggtggctttgaccccgggttgcccggccagcacgaccgaggaggtggctggacagctggaggatgaacggagaagccgactgccccacagacctggaaatggccgcccccaaaggccaagaccgttggtcccaggaagacatgctgactttgctggaatgcatgaagaacaaccttccatccaatgacagctccaagttcaaaaccaccgaatcacacatggactgggaaaaagtagcatttaaagacttttctggagacatgtgcaagctcaaatgggtggagatttctaatgaggtgaggaagttccgtacattgacagaattgatcctcgatgctcaggaacatgttaaaaatccttacaaaggcaaaaaactcaagaaacacccagacttcccaaagaagcccctgaccccttatttccgcttcttcatggagaagcgggccaagtatgcgaaactccaccctgagatgagcaacctggacctaaccaagattctgtccaagaaatacaaggagcttccggagaagaagaagatgaaatatattcaggacttccagagagagaaacaggagttcgagcgaaacctggcccgattcagggaggatcaccccgacctaatccagaatgccaagaaatcggacatcccagagaagcccaaaaccccccagcagctgtggtacacccacgagaagaaggtgtatctcaaagtgcggccagatgagatcatgagagactatatccagaagcacccagagctgaacatcagtgaggagggtatcaccaagtccaccctcaccaaggccgaacgccagctcaaggacaagtttgacgggcgacccaccaagccacctccgaacagctactcgctgtactgcgcagagctcatggccaacatgaaggacgtgcccagcacagagcgcatggtgctgtgcagccagcagtggaagctgctgtcccagaaggagaaggacgcctatcacaagaagtgtgatcagaaaaagaaagattacgaggtggagctgctccgtttcctcgagagcctgcctgaggaggagcagcagcgggtcttgggggaagagaagatgctgaacatcaacaagaagcaggccaccagccccgcctccaagaagccagcccaggaagggggcaagggcggctccgagaagcccaagcggcccgtgtcggccatgttcatcttctcggaggagaaacggcggcagctgcaggaggagcggcctgagctctccgagagcgagctgacccgcctgctggcccgaatgtggaacgacctgtctgagaagaagaaggccaagtacaaggcccgagaggcggcgctcaaggctcagtcggagaggaagcccggcggggagcgcgaggaacggggcaagctgcccgagtcccccaaaagagctgaggagatctggcaacagagcgttatcggcgactacctggcccgcttcaagaatgaccgggtgaaggccttgaaagccatggaaatgacctggaataacatggaaaagaaggagaaactgatgtggattaagaaggcagccgaagaccaaaagcgatatgagagagagctgagtgagatgcgggcacctccagctgctacaaattcttccaagaagatgaaattccagggagaacccaagaagcctcccatgaacggttaccagaagttctcccaggagctgctgtccaatggggagctgaaccacctgccgctgaaggagcgcatggtggagatcggcagtcgctggcagcgcatctcccagagccagaaggagcactacaaaaagctggccgaggagcagcaaaagcagtacaaggtgcacctggacctctgggttaagagcctgtctccccaggaccgtgcagcatataaagagtacatctccaataaacgtaagagcatgaccaagctgcgaggcccaaaccccaaatccagccggactactctgcagtccaagtcggagtccgaggaggatgatgaagaggatgaggatgacgaggacgaggatgaagaagaggaagatgatgagaatggggactcctctgaagatggcggcgactcctctgagtccagcagcgaggacgagagcgaggatggggatgagaatgaagaggatgacgaggacgaagacgacgacgaggatgacgatgaggatgaagataatgagtccgagggcagcagctccagctcctcctcctcaggggactcctcagactctgactccaactgaggctcagccccaccccagggcagccagggagagcccaggagctcccctccccaactgaccacctttgtttctcccccatgttctgtcccttgcccccctggcctcccccactttctttctttcttt

SEQ ID NO: 14123 - protein, 728 aa, Homo sapiens
  misc_feature (1)..(728): Xaa=Unknown amino acid
MNGEADCPTDLEMAAPKGQDRWSQEDMLTLLECMKNNLPSNDSSKFKTTESHMDWEKVAFKDFSGDMCKLKWVEISNEVRKFRTLTELILDAQEHVKNPYKGKKLKKHPDFPKKPLTPYFRFFMEKRAKYAKLHPEMSNLDLTKILSKKYKELPEKKKMKYIQDFQREKQEFERNLARFREDHPDLIQNAKKSDIPEKPKTPQQLWYTHEKKVYLKVRPDEIMRDYIQKHPELNISEEGITKSTLTKAERQLKDKFDGRPTKPPPNSYSLYCAELMANMKDVPSTERMVLCSQQWKLLSQKEKDAYHKKCDQKKKDYEVELLRFLESLPEEEQQRVLGEEKMLNINKKQATSPASKKPAQEGGKGGSEKPKRPVSAMFIFSEEKRRQLQEERPELSESELTRLLARMWNDLSEKKKAKYKAREAALKAQSERKPGGEREERGKLPESPKRAEEIWQQSVIGDYLARFKNDRVKALKAMEMTWNNMEKKEKLMWIKKAAEDQKRYERELSEMRAPPAATNSSKKMKFQGEPKKPPMNGYQKFSQELLSNGELNHLPLKERMVEIGSRWQRISQSQKEHYKKLAEEQQKQYKVHLDLWVKSLSPQDRAAYKEYISNKRKSMTKLRGPNPKSSRTTLQSKSESEEDDEEDEDDEDEDEEEEDDENGDSSEDGGDSSESSSEDESEDGDENEEDDEDEDDDEDDDEDEDNESEGSSSSSSSSGDSSDSDSNX

SEQ ID NO: 14124 - DNA, 2452 bp, Rattus norvegicus; identical to SEQ ID NO: 14120
  ref <308>: DATABASE ACCESSION NUMBER: EMBL / M61725
  ref <309>: DATABASE ENTRY DATE: 2000-03-04

SEQ ID NO: 14125 - protein, 764 aa, Rattus norvegicus; identical to SEQ ID NO: 14121
  ref <308>: DATABASE ACCESSION NUMBER: PIR / B40439
  ref <309>: DATABASE ENTRY DATE: 1997-09-08

SEQ ID NO: 14126 - DNA, 2489 bp, Homo sapiens; identical to SEQ ID NO: 14122
  ref <308>: DATABASE ACCESSION NUMBER: EMBL / X56687
  ref <309>: DATABASE ENTRY DATE: 1997-04-03

SEQ ID NO: 14127 - protein, 728 aa, Homo sapiens; identical to SEQ ID NO: 14123
  misc_feature (1)..(728): Xaa=Unknown amino acid

SEQ ID NO: 14128 - DNA, 1867 bp, Rattus norvegicus
  misc_feature (1)..(1867): n=a, c, g or t
  ref <308>: DATABASE ACCESSION NUMBER: EMBL / M92430
  ref <309>: DATABASE ENTRY DATE: 2000-03-04
ccgtcacccaaccgggtccgcgtagagcgctcatcttcggcgagatgtctgagcgcaaagaaggcagaggcaaggggaagggcaagaagaaggaccggggatcccgcgggaagcccgggcccgccgagggcgacccgagcccagcactgcctcccagattgaaagaaatgaagagccaggagtcagctgcaggctccaagctagtgctccggtgcgaaaccagctccgagtactcctcactcagattcaaatggttcaagaatgggaacgagctgaaccgcaaaaataaaccagaaaacatcaagatacagaacaagccagggaagtcagagcttcgaattaacaaagcatccctggctgactctggagagtatatgtgcaaagtgatcagcaagttaggaaatgacagtgcctctgccaacatcaccattgttgagtcaaacgagttcatcactggcatgccagcctcgactgagacagcctatgtgtcctcagagtctcccattagaatctcagtttcaacagaaggcgcaaacacttcttcatccacatcaacatccacgactgggaccagccatctcataaagtgtgccgagaaggagaaaactttctgtgtgaatgggggcgagtgcttcacggtgaaggacctgtcaaacccgtcaagatccttgtgcaagtgccaacctggattcactggagcaagatgtactgagaatgtacccatgaaagtccaaacccaagaaaaagcggaggaactctaccagaagagggtgctgacaattactggcatctgtatcgccctgctggtggtcggcatcatgtgtgtggtggcctactgcaaaaccaagaagcagcggcagaagcttcatgatcggcttcggcagagtcttcggtcagaacggagcaacctggtgaacatagcgaatgggcctcaccacccaaacccaccgccagagaacgtgcagctggtgaatcaatacgtatctaaaaacgtcatctccagtgagcatattgttgagagagaagtggagacttccttttccaccagtcattacacttccacagcccatcactccacgactgtcacccagactcctagtcacagctggagtaatgggcacacggagagcgtcatttcagaaagcaactccgtaatcatgatgtcttcggtagagaacagcaggcacagcagtcccgccgggggcccacgaggacgtcttcatggcctgggaggccctcgtgataacagcttcctcaggcatgccagagaaacccctgactcctacagagactctcctcatagcgaaaggtaaaatggaagggtaaagctatcgtggaggagaacctcattcagtgagagaatcccatgagcacctgcggtctctcctaaggaaactcatcctttcataaggggcgtcatcaattccctgacgctcctagttgatgaagtcaacctcttatttgtctgaactcctttctcctgagcttctccccgcgtcccagtggctgacaggcaaccaactcctaaagagcaggagtaatgtaatgtggaaggcccanccgacttggagttctcagacctgaccctaaggtcagactcactggggtcttcctttcgtcaggtgcaccattttaaggaccctcatctaatcccgatcagccagttgtccattctctacctcgatggttgttctgccctcctctcctcatgctctaagtacccagcctctagcctcagttaaatcaagtcgagggctgggacacggctgatggtcatggcggnatgcctcctggggttccaccacactgtatccatttacgacatccctagaantcatgggtaaataaagttgttgtgtgatgtgna

SEQ ID NO: 14129 - protein, 662 aa, Rattus norvegicus; identical to SEQ ID NO: 7932
  ref <308>: DATABASE ACCESSION NUMBER: SWISS-Prot / AAA19949
  ref <309>: DATABASE ENTRY DATE: 2001-10-16

SEQ ID NO: 14130 - DNA, 2224 bp, Homo sapiens
  ref <308>: DATABASE ACCESSION NUMBER: Refseq / NM_013964
  ref <309>: DATABASE ENTRY DATE: 2001-02-03
gcgcgagcgcctcagcgcggccgctcgctctccccctcgagggacaaacttttcccaaacccgatccgagcccttggaccaaactcgcctgcgccgagagccgtccgcgtagagcgctccgtctccggcgagatgtccgagcgcaaagaaggcagaggcaaagggaagggcaagaagaaggagcgaggctccggcaagaagccggagtccgcggcgggcagccagagcccagccttgcctccccgattgaaagagatgaaaagccaggaatcggctgcaggttccaaactagtccttcggtgtgaaaccagttctgaatactcctctctcagattcaagtggttcaagaatgggaatgaattgaatcgaaaaaacaaaccacaaaatatcaagatacaaaaaaagccagggaagtcagaacttcgcattaacaaagcatcactggctgattctggagagtatatgtgcaaagtgatcagcaaattaggaaatgacagtgcctctgccaatatcaccatcgtggaatcaaacgagatcatcactggtatgccagcctcaactgaaggagcatatgtgtcttcagagtctcccattagaatatcagtatccacagaaggagcaaatacttcttcatctacatctacatccaccactgggacaagccatcttgtaaaatgtgcggagaaggagaaaactttctgtgtgaatggaggggagtgcttcatggtgaaagacctttcaaacccctcgagatacttgtgcaagtgccaacctggattcactggagcaagatgtactgagaatgtgcccatgaaagtccaaaaccaagaaaaggcggaggagctgtaccagaagagagtgctgaccataaccggcatctgcatcgccctccttgtggtcggcatcatgtgtgtggtggcctactgcaaaaccaagaaacagcggaaaaagctgcatgaccgtcttcggcagagccttcggtctgaacgaaacaatatgatgaacattgccaatgggcctcaccatcctaacccaccccccgagaatgtccagctggtgaatcaatacgtatctaaaaacgtcatctccagtgagcatattgttgagagagaagcagagacatccttttccaccagtcactatacttccacagcccatcactccactactgtcacccagactcctagccacagctggagcaacggacacactgaaagcatcctttccgaaagccactctgtaatcgtgatgtcatccgtagaaaacagtaggcacagcagcccaactgggggcccaagaggacgtcttaatggcacaggaggccctcgtgaatgtaacagcttcctcaggcatgccagagaaacccctgattcctaccgagactctcctcatagtgaaaggtatgtgtcagccatgaccaccccggctcgtatgtcacctgtagatttccacacgccaagctcccccaaatcgcccccttcggaaatgtctccacccgtgtccagcatgacggtgtccatgccttccatggcggtcagccccttcatggaagaagagagacctctacttctcgtgacaccaccaaggctgcgggagaagaagtttgaccatcaccctcagcagttcagctccttccaccacaaccccgcgcatgacagtaacagcctccctgctagccccttgaggatagtggaggatgaggagtatgaaacgacccaagagtacgagccagcccaagagcctgttaagaaactcgccaatagccggcgggccaaaagaaccaagcccaatggccacattgctaacagattggaagtggacagcaacacaagctcccagagcagtaactcagagagtgaaacagaagatgaaagagtaggtgaagatacgcctttcctgggcatacagaaccccctggcagccagtcttgaggcaacacctgccttccgcctggctgacagcaggactaacccagcaggccgcttctcgacacaggaagaaatccaggccaggctgtctagtgtaattgctaaccaagaccctattgctgtataaaacctaaataaacacatagattcacctgtaaaactttattttatataataaagtattccaccttaaattaaacaatttattttattttagcagttctgcaaatagaaaacaggaaaaaaacttttataaattaaatatatgtatgtaaaaatgaaaaaaaaaaaaaaaa

SEQ ID NO: 14131 - protein, 640 aa, Homo sapiens
  ref <308>: DATABASE ACCESSION NUMBER: Refseq / NP_039258
  ref <309>: DATABASE ENTRY DATE: 2001-02-03
MSERKEGRGKGKGKKKERGSGKKPESAAGSQSPALPPRLKEMKSQESAAGSKLVLRCETSSEYSSLRFKWFKNGNELNRKNKPQNIKIQKKPGKSELRINKASLADSGEYMCKVISKLGNDSASANITIVESNEIITGMPASTEGAYVSSESPIRISVSTEGANTSSSTSTSTTGTSHLVKCAEKEKTFCVNGGECFMVKDLSNPSRYLCKCQPGFTGARCTENVPMKVQNQEKAEELYQKRVLTITGICIALLVVGIMCVVAYCKTKKQRKKLHDRLRQSLRSERNNMMNIANGPHHPNPPPENVQLVNQYVSKNVISSEHIVEREAETSFSTSHYTSTAHHSTTVTQTPSHSWSNGHTESILSESHSVIVMSSVENSRHSSPTGGPRGRLNGTGGPRECNSFLRHARETPDSYRDSPHSERYVSAMTTPARMSPVDFHTPSSPKSPPSEMSPPVSSMTVSMPSMAVSPFMEEERPLLLVTPPRLREKKFDHHPQQFSSFHHNPAHDSNSLPASPLRIVEDEEYETTQEYEPAQEPVKKLANSRRAKRTKPNGHIANRLEVDSNTSSQSSNSESETEDERVGEDTPFLGIQNPLAASLEATPAFRLADSRTNPAGRFSTQEEIQARLSSVIANQDPIAV

SEQ ID NO: 14132 - DNA, 3800 bp, Rattus norvegicus; identical to SEQ ID NO: 4181
  ref <308>: DATABASE ACCESSION NUMBER: EMBL / M99567
  ref <309>: DATABASE ENTRY DATE: 2001-03-06

SEQ ID NO: 14133 - DNA, 19289 bp, Homo sapiens
  misc_feature (1)..(19289): n=a, c, g or t
  ref <308>: DATABASE ACCESSION NUMBER: EMBL / U26425
  ref <309>: DATABASE ENTRY DATE: 2000-03-04
ggatccaccctctccaccgggagccctatccgtggcctggcctcctgccctaagcctggcctgataggaggatcactttaccccagtccaaattccccaccacaccccaccaggccaggccagctccctctgaacccaagcattgtttgtaccttgagggtgcacacagattaaagggggaagaccctcaaacagcccctaatgcccaacagcttctgtggaagtgggggctgcaggccatgaagacccccagccctagctctgcccccaagatgctgtgaccctgagccctgacctttctgtctgtcctccctcagggttggtgtgaaggtctcagcatgtccgtgtccacaggtcaggcattctttctgactctccctcttccccccaccgcgccatgcccagggacacccagattcctgtccagttcccatggctatccacccgagaccacttggtgcaggtgggcatgctggtctgccaccttcttggaagctggggcacagaaccttagtcttggagtagaaatactgggttcaaatcctggatctggcccatgggctgagaggctgtatgcaagtcacttacctgctcagagcctcttcagggggcttatggtcctgacctcctgtggttgggggcccatgcccagccctggtcctcctgcatgagccctactgggactggagtgtaccactgctcctcctccttctagcctcagtctgtggcctccccagtcctaccccttccagggtcccaggccccctccattagagtgcatccttgaagcagaggctctggggagggtcctgtgggtcaagaccgctccttcaatcaagggtagagtcccggaaaggctgcctgcctatcaccattactgcctggtgagataccctattaccattaccaaggatggaagaaagtgtctgggaaggaaggagccctgtaatggggggtgccctggcctccagagacacagggttgggggaggagagaggtttaagcccaggaaacaggtgcccatcctgtttttttccacaaggaggtgttgcccaatgcttctctaaagtacgcttgcacaaggtctagggcccacagctcagatcccctaagctcaggcttggctccaggctttgctagccctggcacaggctggaggttccactgccccagagctgacctatgccctttccctccctccctggtatacccacagcttccagctactcatgtcaatttggcatctcccacccatttgcttatgtatacaacaacctttaggttctggacaaggtgactgaggcacctagagagactaggttctgccactagcaagaggctgctagcaagagccggatttgaactccagcctgtgagggcagaggccaagctccaccttgcatggttctgttttcccaatgaggtctagaggctcctgggcctcaggaagtcggagggttgaaatcctcctaagaagctgtgtgaccttgggcaagtcccttcccctctctgggcctcaagtggagatcataatcacaccccccagggccagggctgagaccgaggagatcccccaggttagagttgatggagaacttgtcggggtgtggaggaagaccagggccaggcagggctccttgtggaggtctcagaccctggggcaaaggggcctccaggggagctcctcctttgctgacccctcctcccccagagccagctgcatctctttctgggtttctaggtgacttggctggcccctctggatgagttctactttaaacctgctgctgttactgcctctgtattgggggggctcccacagggccccccaggcaggaaccccccccaccagctaagccctgcgggaggggctgcagcccccacccatcccattgcccatgcgccttccccgctcccatctctggaacgcagatttcagggcacctgctgtgggccaggcactgcagagcccctcctcaaccctcctgtctggggacatccacaaagcttctgacccctctgggcagacaacagcgttccccccgcggttcccagccaagaggctcacagtcaggctccagtcatgggagtctgcagcaacaagaagggggctgttctagggctcactctcgaagaccaggatgcttgggtccttaaaggaggtggcaggcgcccggcctccctgggctagggacgggggaggggtgcctgccggcgggaggtccattagccggctaagtgctcccagggaggggggaccgcgcggcataagagtgggtgaggcgaagccagggcagaggggggcggaagaagcttttcctgcattcagctaagtgcggcagaagagggtgggcgacagggctgtgcagcgaccccccggcccaagtctagccctccgctggtactgcagccctagtcgctcggaaacctcagtgggctgatcccggaccgccttaagcagcgccctctacacccagtccctccagctgctccccaacagccacttcggcccccagcgccctccttccaccacaggcctgaagaatcaggttctgctgagccccgcagcaaagcccccgacccgtccgcgtgcccctgccccaatccccgctccggctgcagtcgccgccccggccgccagggggagccgacgcggtgggagggggcggggcccgggaggccccgccccgtccccgccccgcccgggccccgccgaggctctggtcggtccgggacagactggcgggcgggcgggcactgacgccgcggggccggagcgggccgcgcggtgggagcagcggcgccgtcggtccccgtcagggctccgtgggtccccgacccgcccctggccgggccatggcgggcgcccagcccggcgtccacgcgctgcagttggagccgcccaccgtggtggagaccctgcggcgcgggagtaagttcatcaaatgggacgaggtaagcgcgcgggcccctgctccgcccaaatcccgggactctttcagtcaagctcgaccagacgctggggacccccaccccagcctcgcctgcccgtggcgccaccctcatcccagtctggcggcgccccggaaacttaagtccccgatcgtctccgtaatgaagacttttgtccccccaactcccagtccctcagctctggaaaatttgcctccactccttggcgcagagactttgaaccccaataaaccccgtccccccgttttccattcgttcttcccaccgctccctgccagactaattctcgttccccgatcctggcctggtgcccagacccctgcccagcactagactccccggctgcaggaccctgacttccaggctggctgggggcatcctcattctgggtgtgtgccagggcgctcctactctccccggtgacctgcctgaacagtcctcgtccattcatcatttttccccctgttctggttggcaccccttcgccctgcttctggatccccagcccagctccctgttcagatgggagcacccagtcaccccctagtggagactttggcccccaagttcctccacccctgggaactttgctccccactccttaggcttgggaccttgaaccccaatacatcctgggccccctttccctgtcctggccctggtgcttcccaaatgtctgtgtccccaccttcgggtggccatccccatcctgggtgaaatctcttctgccccctgggcccttccttccctagggcctccacccggccggcctgagcttcctcgcagctccttcccagtcaggccacgggcctggaagactctgggctcttttccggctgggtggggccccggggtaggcgtgggagctggggggaggagatgggggcgtgtccgaagcggcaggtgtgcgaggtggggtgcctggggcccccaggggccgggggagacccctccccccaggctgtcctgaagggaaaagtttcttcttttcattccactgtgataaacccaaataaggaagtgggaacagggagaggcccctgggggtggggtggggggtgctgacggaggcttggggcaggagagcaggggacctgggctgcctttgaggtccagacccctggggagaggtgggagggaaaacacctaggggcagtacccatagactcccctctctgcacaccattcggggccctcaggcccagggtagggttgggaatccggagaagtgctggggctgggtgtcagcacactgaagtggggaggcccatgcatcccccaaattttgggggccttctgttcccagatgaacgcccatcttttgtaagcaaagcctgccatgggtggggctggtgcaatccccattcctccagaagaggaaactgaggtctggaaagcagagagttatcccagcccccacaatggggtgtgtctgaggccaggagccgggagcctggcagaagtctccgctccctgcttcccaggtcacaggacgctacaaccacactgcctgcaagcaggtcctggctccagtgatctcgggcaggctacgaagtgttccctgtaactcagtgtcctcacctgtaaaatgggagtgacaacagcacatacctcttaggctggttaggagacctttgtgtgctcgaagatactaggtgcatagaactgtacctggtgcgcagtaggggcggtgtgcgtatatgagatgtattgataataatagtattgtccaccagacactgagatacattttgggggtggcacccaacatgaggtggggtccttttctgtctggaagaacctggaataggagggttctacctgtagccacttgttcactctgcccctggccgagtctaaagcccctggaggacaccccctctgcctgctggtcctgagtcacacagggtgcccctggtagtgtgccagggaccggccccttcatagaaaatggggctggcatgcacttccctcccccctgccatctgcacgcctgtttgagggaggaagagctcactgcccagtcctgagagtagggcaagtccccttctagggggactgttcttcctacgagatggggatgagctttgagtctgtgaggaccccggcagatgtggtaaggtggataatgggctttgaggcagaccacagggctatcgtgatgtcccaagggatgcagaagggcagtgggagtcagacttcttcactttcatgccttaaacattcttcagtggggtggattgggggcctcccactgtcacagagctctcagcacttctggggaaactgagcccaggatggggcctggggacctcttccagggggtgggtcagatttccacgggtggagaaggaagggcagggtgtcctgcccaaaggaaacatgagacaaacccctgggaaaggtcaggtagaatcctagggccagagggaggtgaggctgggaggaggctttgaggtaggtgtgacactaaatgtcacacctaggaccttggctttgttctgagggccacaggcagccacacaggacctgtggactggatgaggtttcgtcttagctcatgggcaggaactctggggtgcatgatgggagggccccaggggccaggcctgcaccacagccctcacttcctgacccctgctgtccctgtgctgtcctcaggagacctccagtcggaacctggtgaccctgcgtgtggaccccaatggcttcttcttgtactggacgggccccaacatggtgagggtgggcgctggtgcagctcgctcaggccaaggacccctgtcccagacccctgccctgcccgtgggggtggggcccggctgcaggctgacctctcccactgctgcccagacaggaagtgctcagggcaggagctgaggctggggctatagccaggggctggccattccctggcctgggtagagagcttggaagctcctggctattgccctgcagcctctcatactcagcctggcatctggttccccccaggaggtggacacactggacatcagttccatcagggacacacggacaggccggtacgcccgcctgcccaaggtgagtgatgagcctgggagtgaagaccacagcgagactgtgcgggagccccctcttcacccttcgctgtcacctactcaggaccccaagatccgggaagttctgggctttgggggtcccgatgcccggctggaggagaagctgatgacggtggtgtctgggccagacccggtgaacacagtgttcttgaacttcatggccgtgcaggatgacacagccaaggtgggctggcaccaaggggacgaagggggagtcactgtcttattctgtgagtcggccgtcacttaccgaacacctgctgtgttctaggctgctctgtgacctactgtgtaccagaggcagttgtggacctgggttgtggctgggcagcccctgtgtcccccactcaccgcctccccgtgtatactggccccccaggtctggtctgaggagctattcaagctggctatgaacatcctggctcagaacgcctcccggaacaccttcctgcgcaaagcgtgagccccaggccacccgagggggagccggggggttcacgtggccgttttcagggtgtgacctcttcatctgccttcccagatacacgaagctgaagctgcaggtgaaccaggatggtcggatccccgtcaagaagtgagcaccccttcccccagcaccttcctcctgccctgaccttggtgacctttgtcctccactgaccctgaacccctcctgcccgcatcagcatcctgaagatgttctcagcagacaagaagcgggtggagactgcgctggaatcctgtggcctcaaattcaaccgggtgtgtggggtggggacaggggcggggtgtggtgtgtcacggtggacacccacccttacgggggtgcccgcccctggtttctcaccccacactcctcgacctccagagtgagtccatccggcctgatgagttttccttggaaatctttgagcggttcctgaacaagctgtgtctgcggccggacattgacaagatcctgctggagatgtgagtgggcccggcctgcctcacaacccctgtgctctgtgtttagcttctgcttagcgtgcctctagctcaatggggagaggggaaactggtgggccgggtcctggagcgccagggggcggaggggtgcccagggagaacctgtcggtgatgttcctgtactcagacccgccgtttctgcccctcagttaacaggcagctctgggctaaccctgtgccagggttgggttaatcagcccactcttcaatggggtccaagcctcaggtgtgttgtgaggtctggaaacgaggggtggtgggctgaccacttggcagctcctaaaccctggccattgctggtgcccactagtctgctgccttgacaatcctgagtagtcaggagagtaaagggggaaactgaggcccagaggttggccatgactcacccagagtcccactcactgggtgccagatccagggccaggccttctgactcccttgcccagggcaagggcttggcgacggggtgggagccctgccaggctccatcctgacccagcttcctgtcccctccagaggcgccaagggcaagccatacctgacgctggagcagctcatggacttcatcaaccagaagcaacgcgacccgagactcaacgaagtgctgtacccgcccctgcggccctcccaggcccggctgctcatcgaaaagtatgagcccaaccagcagtttctggagcgaggtgagctggctggggtgcaggtgggtgggggcaggtgggacaccagctgaccctgctgatcctctcccaccccagaccagatgtccatggagggctttagccgctacctgggaggcgaggagaatggcatcctgcccctggaagccctggatctgagcacggacatgacccagccactgagtgcctacttcatcaactcctcgcataacacctatctcactggtgagtggggagcaagggtggcacccgtgacctctgccctgtgacccttggacagccccactcctcctgggggacagtccttttggcccatttgctcattcattggccagtgctggggatgcaggcaggggaacaggcagccagccctgagcagtggggcctcatggtggctttcccagggcaagggctggaacagcttgtgttagggcctgcagcaggagagacttcagggtccttttttttttttttttttttttttttttttttttttctttttgagacagagtttcgctcttgttgcccaggctggagtgcaatcggcacgatcttaggctcagcgcaacctctgcctcccaggttcaagcgattctcctgcctcagcctcccaagtagctgggattacaggcattcgccaccacgcccggctaattttgtatttttagtagagatggggtttctccatgttggtcaggctggtctcaaactctcaacctcaggtgatccgcctgcctcgccctcccaaagtgctgggattataggcatgagccacctcgcccagcctgcagggtgcttttaagaggctggaagggggttgggtgcggtgactcatgcctgtaatcccagaactttggaaggctgaagcaggcagcttactcgagcccaccttttgagaccagtctgggcaacatagcatgaccccatctctacaaataatttataaaaaattagctgggcatagtggcgcatgcctgtggtcctagctccttgggagggtgaggtgggagtatcgcttggttctgggaaggttgaggcagaagtaagctgtgattgcaccactgcactccagcctgggtgacagagtgagagacccttttctaaaaaaaaaaattaaataaataataaaaaagcagaaaggaagctggtgcggcagggtgcagagtgctggagataggtgcctcctaagagagggagagcaaggcagggctaagcccaggggcctagaggcacttggattcatcctgggtgtgaggaagaggctttttggagggtgaagcagaagaggtgatgtgacctgatatgatatgtttttagaaggatgatgccaggtgctctatagagattggattgaggccaggcacagtggttcacacctgtaatcccagaactttgaaaggctgaggcgtgtggatcacctgaggtcaggagttcgagaccagcctggccaacatggtgaaaccccatctctactaaaaaaaccaaaattagccaggcatggtggtgggcaactgtaatcccagctactcgggaggctgaggcaggagaatcgcttgaaccagggaggcggaggtttcagtgaaccgaggttgttccactgcactccaacctgggtgacagagcgaggttccgtctctcaaaaaaaaaaaaaaagagattggattggaggcagggaggcctggagtcttccacacaggaggtgtgtgatctgtcccaggactgaggtgggtggagggagtgaggagagggagggattgttgaggcagtggggagctatagtgagtctcagggatgactccccccagctcacgctggtgggatggacaggtggtgggtatccatctgagagatggagagccctctccaaatccagcatgtcctggttccaggtgggaccggggtggtgaggagctgggctggtgggcggcctcggtgacagagcctcgccgccccagcggggcagctggctgggacctcgtcggtggagatgtaccgccaggcactactatggggctgccgctgcgtggagctggacgtgtggaagggacggccgcctgaggaggaacccttcattacccacggcttcaccatgaccacagaggtgcctctgcgcgacgtgctggaggccattgccgagactgccttcaagacctcgccctaccccgtcatcctctccttcgagaaccatgtggactcgtgagtgagcccctggcatgaaaccccatggactgggggacagtcttccagcttcagtgctgttggactgctcagggacctccaaccctgcgaacggccactgacatgtcccgtagacctcagcttcctctctgggggagggatctctgacctctgacctcggttccgcagggcaaagcaacaggcaaagatggctgagtactgccgctccatctttggagacgcgctactcatcgagcctctggacaagtacccggtacgggagctcggagcgaggggggtggcatgggggccagggtgctgcggacccggtccagggccctgactcgtccatgcctgcccagctggccccaggcgttcccctgcccagcccccaggacctgatgggccgtatcctggtgaagaacaagaagcggcaccgacccagcgcaggtggcccagacagcgccgggcgcaagcggcccctggagcagagcaattctgccctgagcgagagctccgcggccaccgagccctcctccccgcagctgggtaggccccagcccggcccgccaccctgatcgaccctagcctctggcctcatgttccaggcgccgtgacacttcatcccagacccccagcccaccctcctgcctcgttggtggcgcctgttcccacaaccggcctgtctcctcaccacctgtcggttggtgtggggcctctgacccctgacctcaggttgaacgtctcacccagctgcaccccaactcctgactcccaacctcagcctctcacctctcagagccttcccacaacccggtgatggctctgaaggctgacctctgacctcagtaaaccacatcccacactgggtgtgacctcagacccctaagcccgcattgagttcacctgcccagttggttatcatttcagctgacctctgacctctcacccctgactgttcacctcactatgccccctccttagacatggctctgacttacccctgacctgtaacctctcctatgtcatcccttaccccgctattagggctgtggtatgctacttcctgacttctcaccccactgaaccaccctatctgcctccctgctgaatatcactgcagacctttacctttgacctatgacccctctcaacccatactgggttaataccatctgacctcgacctcttggcctctccccaagccacactgccctgagagtaccccttgaattccccactgagtcacctcggcacacactgggaaaaacccctccagacttcctaagcagctgtgtggtcctgacccctcaccctgtggccctgtcctctgcagggtctcccagctctgacagctgcccaggcctgagcaatggggaggaggtagggcttgagaagcccagcctggagcctcagaagtctctgggtgacgagggcctgaaccgaggcccctatgttcttggacctgctgaccgtgaggatgaggaggaagatgaggaagaggaggaacagacagaccccaaaaagccaactacagatgaggtcaggcccacagggtgggcaggtcggggaggtagcatctatttacctcccagggggctgggtctaaccatcaacaagactgacatcacccctgcctcctggggctcagtgtgggtgtgagtgaaggtgggaggagggctcttcagtcatcaggcatggaaacaagcatacagttctgctgatgatgtggcctgggaggtgcgagttagggtacagaactggcagaggatagggagtctaccctgggcagggaggtggggcagggagacctcaggaagggggacagcatgtacaaaggtcctggggcagggccagggggtgcaggagcggtgagcattgtcatggggagcattgagtagctgtgaggaatggtacagaaaaaatcagtctgagctgggcgtggtggctcacacctgtgatcccagctactcgggaggctgaggcatgagaatcccttgaacctgggaggtggaggttgcagtgagctgagattgcaccattgcactccaacgtgggctaaaaagggagacactatctcaaaaaaaaaaaaaaaaaaaagacatcattgctataaagacaattactggagcaattagtgaaatttaaagatgggctacatattagataatatgttaatgttttgtttcctgaatttaattattgtattggagttatagaagagaatgtccatatatgctgaagtatttatgggtaaagggtcatgatgtctataatttactcccaaatgattcagtaaaagtaatgataattgtaacacctatatgggccaggcgaggtggctcatacctgtaatcccatcactttgggaggctgaggtgggcgagtcacctgaggttgggaggttccagaccagcctggccaacatggtgaaaccccatctctactaaaaatacataaattatccgggcaaggtggcgggcgcctgtaatcccagctacttgggaggctgaggcaggaaaattgcttgagctgggtggtgtccagggcgcatcagtgagaccccggggagaagactgtcggcaccaccagcagtgtgtatatagtgctgggaagagggtcagcacctccttcatggggggcaggtgagggaatggccagctgtggcgggaatggcactgctgaccctgggttggggcccacagggcacagccagcagcgaggtgaatgccactgaggagatgtccacgcttgtcaactacatcgaacctgtcaagttcaagtcctttgaggctgctcgaagtgagtgggggtgggtggcaggcatgggagcttgcccagctcagccctgccaggtctgacgccctttcttggctcacccctaagagaggaacaaatgcttcgagatgtcgtcctttgtggagaccaaggccatggagcaactgaccaagagccccatggagtttgtggagtatcctttgaaggtgctgtgggcggacaggccagggtggggcgctcggaggccggctccggtgttctatccccacatataccacctgcacagggtgctggccctccggcggccctcctgcaccctggcctggggcttgggcagatccaggcagtctcagggggcatggctaggctaagaaacagaggccgggtgtgggggtcacaggagcacctggctgaggccggaggtggaggctgatggggtgggccctggcacctgtgtggcccctgaccaccaatctcagatacaacaagcagcagctcagccgcatctaccccaagggcacccgcgtggactcctccaactacatgccccagctcttctggaacgtagggtgccagcttgttgcgctcaacttccagaccctcggtgagccctggccccctccatcttgaccccgaccctcagtcttactgacttctgacccacgatcctgctggtcttgcctgaatggacctctgaccctgtctcatcccagatcccaggggaacccagctcccgactcaccccgcctcctgcccttggctgataccagacccctcccctgtctgatctgtcctggatccggaccctgatgccatttgagcccgcccctgaccctggaccttggatgccatctgacctgatgatctcccattccccacatggcaccgtcctgcctgatccctgcccctgctcgacgtgcccgtggcaccccagatgtggcgatgcagctcaacgcgggcgtttttgagtacaacgggcgcagcgggtacctgctcaagccggagttcatgcggcggccggacaagtccttcgaccccttcactgaggtcatcgtggatggcatcgtggccaatgccttgcgggtcaaggtggggcttgcgggcggctcaggccaggggtgtcctgggggcaggactctcagcatccgcctcaccctccttggcccacccccaggtgatctcagggcagttcctgtccgacaggaaggtgggcatctacgtggaggtggacatgtttggcctccctgttgatacgcggcgcaagtaccgcacccggacctctcaggggaactcgttcaaccccgtgtgggacgaagagcccttcgacttccccaaggtgagcctggcccctgcacccgcccaggcacaggcagatccagcccagaccgccccgactctcaggtgggagaacaggaaccaggcacaccgttggcgactggggatcagaaagtggggggtgccatgggtcccccaggacctgcctgtccgagcgtcagtctccctgccctccttagggtaagagaccagggtgagaaggtgagattggggttggggggtgtcagctagacgtcttgtgtcccctccgaggagtggacacagcctaccctgtctccgaggcaggagctgaggtcacaaccccaagctcatatccgctcttcagcaccccgcacggccctgcatggacgcggcctctgttcccagcctgggcatgtgtgttcttggtttcctgctcatgactcactcccgtttctaaactggcaatgaccagaactgtctgtgggggccctggaggggcctggctgcctgtcatcttgcctcagggtcctgatggctgcagtcatccattaggccaggacatggaagtggggtcagccatcagcttagtggcaatggtgactgatggtcagtaggtcagctcgtctgaaggtctgctttgttaagctttgatggctgtggttagctgtggcctggtagccacagtggcccagggtcagccctgcggctcagctccagtctggcccacaggtggtgctgcccacgctggcttcacttcgcattgcagcctttgaggaggggggtaaattcgtagggcaccggatcctgcctgtctctgccatccgctccggtgaggccttggtgggctctgggcagcacagcgggcagtgggtagggcccccacctggcccagcaacccaacgttgccttcctgaccacccaggataccactacgtctgcctgcggaacgaggccaaccaaccgctgtgcctgccggccctgctcatctacaccgaagcctcggactacattcctgacgaccaccagggtgagctgggggtgggcggggcctgcctggccagggagtgtgagggacaagggccacccccagggcctgggagtggccgagctggatggccccgactgagtagggaactgagtagggaacagatctgaggacaagctctggaattcctcattgagaccagaggtggcgggtgggggtggcctgggggctctgtctctgagaccttggccttctgcctccccccagactatgcggaggccctgatcaaccccattaagcacgtcagcctgatggaccagagggcccggcagctggccgccctcattggggagagtgaggtgagccggggcagggcagggctcaggctcactgtgacccagggggccgctggacatgactgctgtggccacatgaggagggggcttctggtctctctagcgcagtaggcttgggcagccctgggattttgaggagatgaaaaccacccatttgcattcaggaggccttcaggtcacacctgggctggaattcctccagctccatgtaggcttggagtgggggtacaggggtctcagccacttcatcagggcagtgcgaagccacagaagctgttcagacgtggtgtcctgggagtcatgaggagggcagtggcttccgtggggaggggtcaggcacggaggttcacctgcgcttccagatccagtccccccagggcctgcggcaggcgggcggggagagatgactgcaattagggctgcctggagctgttagcggagaggctggtgcccactctgcggttgagtcctctgttgatttaatcaggagctcagcagcaaggaaaatgagcgactgtaggcaaggctgggggacacaggcaggggaggagaggaggcttggggctgggccaggcctttccagaacaatctgggagttactgagcacatgcagtgggctggcattatgttatccttcccccacagcccatgtggaaaaggggtttagaaaggcttgatttatagctcttctcatgcagacagcctcctgttacagagcagtccagcagtggcttggactaagggaggctgacaggggtgctaggggacccaggaggtggtagaggacagaagggtctggagggaacagcattctctgaaaagagcattctcctttctccctataggctcaggctggccaagagacgtgccaggacacccagtctcagcagctggggtctcagccgtcctcaaaccccacccccagcccactggatgcctccccccgccggccccctggccccaccacctcccctgccagcacctccctcagcagcccaggtaaggagtggcctgggtcgggggtgggttgcagggaggcaccccccaccctgtcctccagctcctcacagggcctctgctccccagggcagcgtgatgatctcatcgccagcatcctctcaggtagggggcggggtacctggaggcagggggttgccttggaggttcccccaccccccgcccacctttggtctgccgctcccagaggtggcccccaccccgctggatgagctccgaggtcacaaggctctggtcaagctccggagccggcaagagcgagacctgcgggagctgcgcaagaagcatcagcggaaggcagtcaccctcacccgccgcctgctggatggcctggctcaggcacaggctgagggcaggtgccggctgcggccaggtgccctgtgagtgtctgggccgcctgtgtgctatgtgtgctgggtgtgctgatgtgaacatgggggtcggtgggcatggagagatggcaagagctgctccttgacccccagggaggagggttcagtgcaaggatggaggaggctttccacaccaggcgtccctgtgtcccccagggagtgacatctcttttgaagtccatgaggagcatgttgcccaaacaggctccccatcacttgggtggagctaacaggcctcctggtttgcataacagacctggccccatgggatggtgtctgccatcgcttgccaggatgtgcccccctacacaccctccccatcccagtccatgtgacgggcccaggcatcacccagaggggttctcctcgcagaggtggggccgctgatgtggaggacacgaaggagggggaggacgaggcaaagcggtatcaggagttccagaacagacaggtgcagagcctgctggagctgcgggaggcccaggtggacgcagaggcccagcggaggctggaacacctgagacaggtagggggcctgcagtggccagggaaagcctgctggatagacccgtcgtcagcccggcatcacctgtcagctccctgtgtccacaggctctgcagcggctcagggaggtcgtccttgatgcaaacacaactcagttcaagaggctgaaagagatgaacgagaggtgaaagccgaggattgtctatgggaagggctggggacttctagtaccagaaggagggcagagtctgtgcttctgccgctgacccctcctcttcccctgccggcttctccagggagaagaaggagctgcagaagatcctggacagaaagcgccataacagcatctcggaggccaagatgagggacaagcataagaaggaggcgtaagggcaccgggaccgggggccatctgggtactggggaggcagggcaggtgtctgggccccgagccatcctgcgttgctcccgtgcagggaactgacggagattaaccgtcggcacatcactgagtcagtcaactccatccgtcgggtgagtcaggctcccgggccaccctaccccacctcccttccttcactcatcagacacccatctccatgcctggcctggtgccacgttggcctcaaggttcttctagggcctttctcaagtgcccaacagccccagggtacccacatcatacccaaagccaactgtctgtaccagtgtccctggctttggggtccttgggcccagtcctctcacaaccctgatacattggcctgggaggcttcgcccacctgacttctttttctttgagacagagtctcactctgtcgcccaggctggagtgcagtggcgcgatcttggctcactgcaacctcttgggttcaagcaattctcttgcctcagcctcccgagtagctgggattacaggcatccgccaccatgcctggctaatttttttatttttagtagagatggggtttcaccatgttggccaggctgttctcgaactcctgacctcaggtgatccgcccgccttggcctcccaaagtgctgggattatagatgtgagccactgcacccggcctcgcccacctgacttctatacccagccagagcctcgaggctctagcccctccctcagggcccctcagctgagcccttgcccacgcctgtagctggaggaggcccagaagcagcggcatgaccgtcttgtggctgggcagcagcaggtcctgcaacagctggcagaagaggagcccaaggtgaggccatgggcgaacaggtgggcagacggtgtgcaaggcagccaggcctcgcctgtgatgcccatccttctcccacagctgctggcccagctggcccaggagtgtcaggagcagcgggcgaggctcccccaggagatccgccggagcctgctgggcgagatgccggaggggctgggggacgggcctctggtggcctgtgccagcaacggtcacgcacccgggagcagcgggcacctgtcgggcgctgactcggagagccaggaggagaacacgcagctctgaactggctgagcgaggtggccacagggccagggcgggcgctgggtggagggcaggaggcaatgacactaatgctttttttttttttttttaactttttatctagaaattttatttttttaaacccggggcaagtacctcagctaactcccttcatcctcctggggcccctccttcctgccctcagtcttaggttagggccttggtcagggctttgctccctgtgacacccacaccctcgagctagcagcgtctcctcccttccccgggagagctggctggagacttggagctccgggaagtaggagtcacatttttttctctattctttggggattttttttacatgaataaaagtggatttcagggcaccctgtgtgcagtgtgatttggggtgacagnactctnggccctaagtttcctcatctataaaatggactttgggcatttggtggggttgaggtcacgcctccagccacgggctg

SEQ ID NO: 14134 - DNA, 3800 bp, Rattus norvegicus; identical to SEQ ID NO: 4181
  ref <308>: DATABASE ACCESSION NUMBER: EMBL / M99567
  ref <309>: DATABASE ENTRY DATE: 2001-03-06

SEQ ID NO: 14135 - DNA, 19289 bp, Homo sapiens; identical to SEQ ID NO: 14133
  misc_feature (1)..(19289): n=a, c, g or t
  ref <308>: DATABASE ACCESSION NUMBER: EMBL / U26425
  ref <309>: DATABASE ENTRY DATE: 2000-03-04

SEQ ID NO: 14136 - DNA, 3800 bp, Rattus norvegicus; identical to SEQ ID NO: 4181
  ref <308>: DATABASE ACCESSION NUMBER: EMBL / M99567
  ref <309>: DATABASE ENTRY DATE: 2001-03-06

SEQ ID NO: 14137 - DNA, 19289 bp, Homo sapiens; identical to SEQ ID NO: 14133
  misc_feature (1)..(19289): n=a, c, g or t
  ref <308>: DATABASE ACCESSION NUMBER: EMBL / U26425
  ref <309>: DATABASE ENTRY DATE: 2000-03-04

SEQ ID NO: 14138 - DNA, 2026 bp, Rattus norvegicus; identical to SEQ ID NO: 8326
  ref <308>: DATABASE ACCESSION NUMBER: EMBL / U30788
  ref <309>: DATABASE ENTRY DATE: 2000-03-04

SEQ ID NO: 14139 - DNA, 2113 bp, Rattus norvegicus
  ref <308>: DATABASE ACCESSION NUMBER: EMBL / X00923
  ref <309>: DATABASE ENTRY DATE: 1992-05-07
ataatcaggggcctccctgggtttgtgcttgggtttagagaatgaagacaagacccagaaggagactgtctcctagactggaagagaatccccagaaccctgctcctgtcacagctgccctaatcagtcccctatgctgcaggcatgcagtgatctaaacaaatctaacctaggtccttcctgtcccacagtttctgtcaaggccccttcactctatcccttgaagccctgtagcagcgaaaacacggcttcggtgacattgggctgcctggtaaaggactacttccctgatccggtgactgtgacctggtattcagactccctgaacacgagcaccatgaacttcccgtctgtcggttctgatcttaagaccaccaccagccaaatgaccagctggggcaagtcagccaagaacttcacttgccacgtgacacatgccccatccacattcgtcagtgacttgactatccggggtaagcagggttgagctggttacagttaccacaagagggaacatggtcagagcagaaaggaccgctcatatatacctataacagggggccaggggacccaacatactcaggggcctggtttgaggcttgaggggacataaggttagggagatactcacagctcactgcctctgccctagctcgacctgtcaacatcaccaagcccactgtagatctactccattcatcctgcgaccccaacgcattccactccaccatccagctgtactgctttgtttacggccacatccaaaatgatgtctctatccactggctaatggacgatcggaagatatatgaaacacatgcacaaaatgtcctaatcaaggaggaaggcaaactagcctctacctacagtagactcaacatcacccagcagcaatggatgtctgaaagcaccttcacctgcaaggtcacctcccaaggcgagaactattgggcccacactcggagatgctcaggtaggcccacactcgcctgatgctgagacctcagagttctgaagggaaggcaggctcttacgcagcccttcctctcttacagatgatgagccccggggtgtgattacctacctgatcccacccagtcccctcgacctgtatgaaaatgggactcccaaacttacctgtctggttttggacctggaaagtgaggagaatatcaccgtgacgtgggtccgagagcgtaagaagtctataggttcggcatcccagaggagtaccaagcaccataatgccacaaccagtatcacctccatcttgccagtggatgccaaggactggatcgaaggtgaaggctaccagtgcagagtggaccaccctcactttcccaagcccattgtgcgttccatcaccaaggccccaggtgagcacaggagatggagagtgggccggcccttctctgtgttcagatggcacggttaactggttaactcgtgtctgcccacaggcaagcgctcagccccagaggtatatgtgttcctgccaccggaggaggaggagaaggacaaacgaacactcacctgcttgatccagaatttcttccccgaggatatctctgtgcagtggctgcaggatagcaagctgatccccaaaagccaacatagtaccacgacgcctctgaaatacaatggctccaaccaacgcttcttcatctttagccgcctggaggtcaccaaggcactctggacacagacaaaacagttcacctgccgagtgatccatgaggcacttcgggaacccaggaagctggagagaacaatatccaagagccttggtaacacttccctccgtccctcccaggcctccatgtagctgtgatggggaaggtgaatggcagacatctgcccactgttgtaacactgggaagccaccccaataaacactcagtgcctgattagagccctgggtgcccttcttcggggaaggtgggttgtgggcagaagtatcttggcctgaaagaagggaaaccccaagagagggacaggagtgaagcatggctcacccatctgtctatgtgttgggtatttgacaaataggacatcacagggcttcagcatagataaccctggtccttcctgcccttcactgtatcatgcacct

SEQ ID NO: 14140 - DNA, 495 bp, Homo sapiens
  ref <308>: DATABASE ACCESSION NUMBER: EMBL / L00021
  ref <309>: DATABASE ENTRY DATE: 2002-01-09
cacccagcaaccacatctgtcctctagagaatcccctgagagctccgttcctcaccatggactggacctggatcctcttcttggtggcagcagccacgcgagtccactcccagacgcagttggtgcagtctggggctgaggtgaggaagcctggggcatcagtgagggtctcctgcaaggcttctggatacaccttcatcgactcctatatccactggatacgacaggcccctgggcacgggcttgagtgggtgggatggatcaaccctaacagtggtggcacaaactatgctccgagatttcagggcagggtcaccatgaccagagacgcgtccttcagtacagcctacatggacctgagaagtctgagatctgacgactcggccgtgttttactgtgcgaaaagtgaccctttttggagtgattattataactttgactactcgtacactttggacgtctggggccaagggaccacggtcaccgtctcctcag

SEQ ID NO: 14141 - protein, 428 aa, Homo sapiens
  ref <308>: DATABASE ACCESSION NUMBER: SWISS-Prot / AAB59424
  ref <309>: DATABASE ENTRY DATE: 2002-06-15
ASTQSPSVFPLTRCCKNIPSNATSVTLGCLATGYFPEPVMVTWDTGSLNGTTMTLPATTLTLSGHYATISLLTVSGAWAKQMFTCRVAHTPSSTDWVDNKTFSVCSRDFTPPTVKILQSSCDGGGHFPPTIQLLCLVSGYTPGTINITWLEDGQVMDVDLSTASTTQEGELASTQSELTLSQKHWLSDRTYTCQVTYQGHTFEDSTKKCADSNPRGVSAYLSRPSPFDLFIRKSPTITCLVVDLAPSKGTVNLTWSRASGKPVNHSTRKEEKQRNGTLTVTSTLPVGTRDWIEGETYQCRVTHPHLPRALMRSTTKTSGPRAAPEVYAFATPEWPGSRDKRTLACLIQNFMPEDISVQWLHNEVQLPDARHSTTQPRKTKGSGFFVFSRLEVTRAEWEQKDEFICRAVHEAASPSQTVQRAVSVNPGK

SEQ ID NO: 14142 - DNA, 988 bp, Rattus norvegicus; identical to SEQ ID NO: 9263
  ref <308>: DATABASE ACCESSION NUMBER: EMBL / X06150
  ref <309>: DATABASE ENTRY DATE: 1999-02-10

SEQ ID NO: 14143 - protein, 292 aa, Rattus norvegicus; identical to SEQ ID NO: 9264
  ref <308>: DATABASE ACCESSION NUMBER: SWISS-Prot / P13255
  ref <309>: DATABASE ENTRY DATE: 2002-06-15

SEQ ID NO: 14144 - DNA, 1240 bp, Homo sapiens
  ref <308>: DATABASE ACCESSION NUMBER: EMBL / X62250
  ref <309>: DATABASE ENTRY DATE: 1993-12-08
cggtggccatggaagtcggaatccgctaaggagtgtgtaacaactcaccggccgaatgaactagccctgaaaatggatggcgctcaagcgtgttacctatactctaccgtcagggttgatatgatgccctgacgagtacggcgcggcgaggatggtggacagcgtgtaccggacccgctccctgggggtggcggccgaagggctcccggaccagtacgcggagggggaggcggcgcgcgtgtggcagctgtatatcggagacacccgcagccgcaccgccgagtacaaggcatggctgcttgggctgctgcgccagcacggctgccagcgggtgctcgacgtagcctgtggcactggggtggactccattatgctggtggaagagggcttcagtgtgacgagtgtggatgccagtgacaagatgctgaagtatgcacttaaggagcgctggaaccggcggcacgagcccgccttcgacaagtgggtcatcgaagaagccaactggactctggacaaagatgtgccccagtcagcagagggtggctttgatgctgtcatctgccttggaaacagtttcgctcacttgccagactgcaaaggggaccagagtgagcaccggctggcgctgaaaaacattgcgagcatggtgcgggcagggggcctactggtcagtgatcatcgcaactacgaccacatcctcagtacaggctgtgcacccccagggaagaacatctactataagagtgacttgaccaaggacgtcacaacatcagtgctgatagtgaacaacaaggcccacatggtgaccctggactatacggtgcaggtgccgggggctggccaggatggctctcctggcttgagtaagttccggctgtcctactacccacactgtctggcatccttcacggagtctccaagcagcttcggaggtaagtgccagcacagcgtcctgggcgacttcaagccttacaaacccggccaaacctacattccctgctacttcatccacgtgctcaagaggacagactgagtgtgtggcctcagctcccacaagcctctgcccaggcactgctaggctctgtctggaagatggggaccagcagccccacaccagggccagcctctagagcagactacagctggggtgcagggatgtgggttccacagacggaaggaagggtaaacaatatagtctttttcagttcctgaaaaaaaaaaaaaaaaaaaaaaaaaaaaa

SEQ ID NO: 14145 - protein, 264 aa, Homo sapiens
  misc_feature (1)..(264): Xaa=Unknown amino acid
WQLYIGDTRSRTAEYKAWLLGLLRQHGCQRVLDVACGTGVDSIMLVEEGFSVTSVDASDKMLKYALKERWNRRHEPAFDKWVIEEANWTLDKDVPQSAEGGFDAVICLGNSFAHLPDCKGDQSEHRLALKNIASMVRAGGLLVSDHRNYDHILSTGCAPPGKNIYYKSDLTKDVTTSVLIVNNKAHMVTLDYTVQVPGAGQDGSPGLSKFRLSYYPHCLASFTESPSSFGGKCQHSVLGDFKPYKPGQTYIPCYFIHVLKRTDX

SEQ ID NO: 14146 - DNA, 1361 bp, Rattus norvegicus
  ref <308>: DATABASE ACCESSION NUMBER: EMBL / X06801
  ref <309>: DATABASE ENTRY DATE: 1993-09-12
ccagccagtcgccatcaggaacctcgagaagctgctccagctatgtgtgaagaggaagacagcacagctctggtgtgtgacaatggctccgggctctgtaaggcgggctttgctggtgatgatgctcccagggctgttttcccatccatcgtgggacgtcccagacaccagggagtgatggttggaatgggccaaaaggacagctatgtgggggacgaagcgcagagcaagagagggatcctgaccctgaagtatccgatagaacacggcatcatcaccaactgggacgacatggaaaagatctggcaccactccttctataacgagcttcgcgtggccccagaggagcatccgaccttgctaacggaggcgccgctgaaccctaaggccaaccgggagaaaatgacccagattatgtttgagaccttcaatgtccctgccatgtatgtggctattcaggctgtgctgtccctctatgcttctggacgtacaactggtattgtgctggactctggagatggcgtgactcacaacgtgcctatctatgagggctatgctctgcctcatgccatcatgcgtctggacttggctggccgagatctcaccgactacctcatgaagatcctgactgagcgtggctattccttcgtgactactgctgagcgtgagatcgtccgtgacatcaaggagaagctgtgctatgtcgctctggactttgaaaatgagatggccactgctgcttcctcttcttccctggagaagagctacgaactgcctgatgggcaggtgatcaccatcgggaatgaacgcttccgctgcccggagaccctcttccagccatctttcattggaatggagtcggcgggcatccacgaaaccacctataacagcatcatgaagtgtgatattgacatcaggaaggacctctatgctaacaacgtcctctcggggggcactaccatgtacccaggcattgctgacaggatgcagaaggagatcacagccctcgctcccagcaccatgaagatcaagattattgctcctccagaacgcaaatattctgtctggatcggcggctccatcctggcttctctatctaccttccagcagatgtggatcagcaaacaggagtatgacgaagctggcccctccattgtccaccgcaaatgcttctaagtcacgcccccaccctccgccccgcccccacccccgccccgcccccgctctgtctctagcacacaactgtgaatgttttgtggatcagcgccttcagttcttttccaaatcattcctacctaaagctttgatttgttactcgtgtgtttttttttaataaatcagacatgtgctacccttctaaa

SEQ ID NO: 14147 - protein, 377 aa, Rattus norvegicus
  ref <308>: DATABASE ACCESSION NUMBER: SWISS-Prot / CAA29957
  ref <309>: DATABASE ENTRY DATE: 2001-10-16
MCEEEDSTALVCDNGSGLCKAGFAGDDAPRAVFPSIVGRPRHQGVMVGMGQKDSYVGDEAQSKRGILTLKYPIEHGIITNWDDMEKIWHHSFYNELRVAPEEHPTLLTEAPLNPKANREKMTQIMFETFNVPAMYVAIQAVLSLYASGRTTGIVLDSGDGVTHNVPIYEGYALPHAIMRLDLAGRDLTDYLMKILTERGYSFVTTAEREIVRDIKEKLCYVALDFENEMATAASSSSLEKSYELPDGQVITIGNERFRCPETLFQPSFIGMESAGIHETTYNSIMKCDIDIRKDLYANNVLSGGTTMYPGIADRMQKEITALAPSTMKIKIIAPPERKYSVWIGGSILASLSTFQQMWISKQEYDEAGPSIVHRKCF

SEQ ID NO: 14148 - DNA, 1330 bp, Homo sapiens
  ref <308>: DATABASE ACCESSION NUMBER: Refseq / NM_001613
  ref <309>: DATABASE ENTRY DATE: 2002-11-05
gcagcccagccaagcactgtcaggaatcctgtgaagcagctccagctatgtgtgaagaagaggacagcactgccttggtgtgtgacaatggctctgggctctgtaaggccggctttgctggggacgatgctcccagggctgttttcccatccattgtgggacgtcccagacatcagggggtgatggtgggaatgggacaaaaagacagctacgtgggtgacgaagcacagagcaaaagaggaatcctgaccctgaagtacccgatagaacatggcatcatcaccaactgggacgacatggaaaagatctggcaccactctttctacaatgagcttcgtgttgcccctgaagagcatcccaccctgctcacggaggcacccctgaaccccaaggccaaccgggagaaaatgactcaaattatgtttgagactttcaatgtcccagccatgtatgtggctatccaggcggtgctgtctctctatgcctctggacgcacaactggcatcgtgctggactctggagatggtgtcacccacaatgtccccatctatgagggctatgccttgccccatgccatcatgcgtctggatctggctggccgagatctcactgactacctcatgaagatcctgactgagcgtggctattccttcgttactactgctgagcgtgagattgtccgggacatcaaggagaaactgtgttatgtagctctggactttgaaaatgagatggccactgccgcatcctcatcctcccttgagaagagttacgagttgcctgatgggcaagtgatcaccatcggaaatgaacgtttccgctgcccagagaccctgttccagccatccttcatcgggatggagtctgctggcatccatgaaaccacctacaacagcatcatgaagtgtgatattgacatcaggaaggacctctatgctaacaatgtcctatcagggggcaccactatgtaccctggcattgccgaccgaatgcagaaggagatcacggccctagcacccagcaccatgaagatcaagatcattgcccctccggagcgcaaatactctgtctggatcggtggctccatcctggcctctctgtccaccttccagcagatgtggatcagcaaacaggaatacgatgaagccgggccttccattgtccaccgcaaatgcttctaaaacactttcctgctcctctctgtctctagcacacaactgtgaatgtcctgtggaattatgccttcagttcttttccaaatcattcctagccaaagctctgactcgttacctatgtgttttttaataaatctgaaataggctactggtaa

SEQ ID NO: 14149 - protein, 377 aa, Homo sapiens; identical to SEQ ID NO: 14147
  ref <308>: DATABASE ACCESSION NUMBER: Refseq / NP_001604
  ref <309>: DATABASE ENTRY DATE: 2002-11-05

SEQ ID NO: 14150 - DNA, 1361 bp, Rattus norvegicus; identical to SEQ ID NO: 14146
  ref <308>: DATABASE ACCESSION NUMBER: EMBL / X06801
  ref <309>: DATABASE ENTRY DATE: 1993-09-12

SEQ ID NO: 14151 - protein, 377 aa, Rattus norvegicus; identical to SEQ ID NO: 14147
  ref <308>: DATABASE ACCESSION NUMBER: SWISS-Prot / CAA29957
  ref <309>: DATABASE ENTRY DATE: 2001-10-16

SEQ ID NO: 14152 - DNA, 1330 bp, Homo sapiens; identical to SEQ ID NO: 14148
  ref <308>: DATABASE ACCESSION NUMBER: Refseq / NM_001613
  ref <309>: DATABASE ENTRY DATE: 2002-11-05

SEQ ID NO: 14153 - protein, 377 aa, Homo sapiens; identical to SEQ ID NO: 14147
  ref <308>: DATABASE ACCESSION NUMBER: Refseq / NP_001604
  ref <309>: DATABASE ENTRY DATE: 2002-11-05

SEQ ID NO: 14154 - DNA, 1361 bp, Rattus norvegicus; identical to SEQ ID NO: 14146
  ref <308>: DATABASE ACCESSION NUMBER: EMBL / X06801
  ref <309>: DATABASE ENTRY DATE: 1993-09-12

SEQ ID NO: 14155 - protein, 377 aa, Rattus norvegicus; identical to SEQ ID NO: 14147
  ref <308>: DATABASE ACCESSION NUMBER: SWISS-Prot / CAA29957
  ref <309>: DATABASE ENTRY DATE: 2001-10-16

SEQ ID NO: 14156 - DNA, 1330 bp, Homo sapiens; identical to SEQ ID NO: 14148
  ref <308>: DATABASE ACCESSION NUMBER: Refseq / NM_001613
  ref <309>: DATABASE ENTRY DATE: 2002-11-05

SEQ ID NO: 14157 - protein, 377 aa, Homo sapiens; identical to SEQ ID NO: 14147
  ref <308>: DATABASE ACCESSION NUMBER: Refseq / NP_001604
  ref <309>: DATABASE ENTRY DATE: 2002-11-05

SEQ ID NO: 14158 - DNA, 1361 bp, Rattus norvegicus; identical to SEQ ID NO: 14146
  ref <308>: DATABASE ACCESSION NUMBER: EMBL / X06801
  ref <309>: DATABASE ENTRY DATE: 1993-09-12

SEQ ID NO: 14159 - protein, 377 aa, Rattus norvegicus; identical to SEQ ID NO: 14147
  ref <308>: DATABASE ACCESSION NUMBER: SWISS-Prot / CAA29957
  ref <309>: DATABASE ENTRY DATE: 2001-10-16

SEQ ID NO: 14160 - DNA, 1330 bp, Homo sapiens; identical to SEQ ID NO: 14148
  ref <308>: DATABASE ACCESSION NUMBER: Refseq / NM_001613
  ref <309>: DATABASE ENTRY DATE: 2002-11-05

SEQ ID NO: 14161 - protein, 377 aa, Homo sapiens; identical to SEQ ID NO: 14147
  ref <308>: DATABASE ACCESSION NUMBER: Refseq / NP_001604
  ref <309>: DATABASE ENTRY DATE: 2002-11-05

SEQ ID NO: 14162 - DNA, 3418 bp, Rattus norvegicus
  ref <308>: DATABASE ACCESSION NUMBER: EMBL / X16623
  ref <309>: DATABASE ENTRY DATE: 1992-10-21
ggtgtgaataggtgtcaaccgcctctgtggctaccagctcgtttccagagccaaccacagatgacgtgtctccttctctccacgctgaagtgggctctccacattccacagaggtggatgactccctgtcggtgtcggtggtgcaaacaccaactactttccaggaaacagaaatgtctccgtctaaagaagagtgcccaagaccaatgtcgatttctcctcctgacttctcccctaagacagccaaatccaggacaccagttcaagatcaccgatccgaacagtcttcaatgtctattgaattcggtcaggaatcccccgagcattctcttgctatggactttagtcggcagtctccagaccaccctactgtgggtgctggtatgcttcacatcaccgaaaatgggccaactgaggtggactacagtccctccgatatccaggactctagtttgtcacataagattccgccgacagaagagccatcctacacccaggataatgatctgtccgagctcatctctgtgtctcaggtggaggcttccccatccacctcttctgctcacactccttctcagatagcctctcctcttcaggaagacactctctctgatgtcgttcctcccagagatatgtccttatatgcctcgcttgcgtctgagaaagtgcagagcctggaaggagagaaactctctccaaaatccgatatttctccgctcacccctcgagagtcctcacctacatattcacctggcttttcagattctacctctggagctaaagagagtacagcggcttaccaaacctcctcttccccaccaatagatgcagcagccgcagagccctacggcttccgctcctcaatgttatttgatacaatgcagcatcacctggccttgagtagagatttgaccacatctagtgtggagaaggacaatggagggaagacacccggtgactttaactatgcctatcaaaagcccgagagcaccaccgaatccccagatgaagaagattatgactatgaatctcacgagaaaaccatccaggcccacgatgtgggtggttactactatgagaagacagagagaaccataaaatccccatgtgacagtggatactcctatgagaccattgagaagaccaccaagaccccagaagatggtggctactcctgtgaaattaccgagaaaaccactcggacccctgaagagggcgggtactcgtatgagatcagcgagaagacaacacgaacccctgaagtaagtggctacacctatgagaagaccgagaggtccagaaggctcctcgatgacattagcaatggctacgatgacactgaggatggtggccacacacttggcgactgtagctattcctacgaaaccactgagaaaattaccagctttcctgaatctgaaagctattcctatgagacaactacaaaaacaacacggagtccagacacctctgcatactgttacgagaccatggagaagatcaccaagaccccacaggcatccacatactcctatgagacctcagaccgatgctacactccagaaaggaagtccccctcggaggcacgccaggatgttgacttgtgtctggtgtcctcctgtgaattcaagcatcccaagaccgagctctcaccttccttcattaatccaaaccctctcgagtggtttgctggggaagagcccactgaagaatctgagaagcctctcactcagtctggaggagcccccccaccttcaggaggaaaacaacagggcagacaatgcgatgaaactccacccacctcagtcagtgagtcagctccatcccagacggactctgatgttcccccagagacagaagagtgcccctccatcacagctgatgccaacattgactctgaagatgagtcagaaaccatccccacagacaaaacggttacgtacaaacacatggacccgcctccagcccccatgcaagaccgaagcccttctcctcgccaccctgatgtgtccatggtggatccagaggccttggctattgagcagaacctaggcaaggctctgaaaaaggatctgaaggagaaggccaagaccaagaaaccaggcacaaagaccaagtcctcttcacctgtcaaaaagggtgatgggaagtccaagccttcagcagcttcccccaaaccaggagccttgaaggaatcctctgacaaggtgtccagagtggcttctcccaagaagaaagagtctgtggagaaagctatgaagaccaccaccactcctgaggtcaaagccacacgaggggaagagaaggacaaggaaactaagaatgcagccaatgcttctgcatccaagtcagtgaagactgcaacagcaggaccaggaaccactaagacggccaagtcgtccaccgtgcctcccggcctccctgtgtatttggacctctgctatattcccaaccacagcaacagtaagaatgtcgatgttgagtttttcaagagagtgaggtcatcttactacgtggtgagtgggaacgaccctgccgcggaggagcccagccgggctgtcctggatgccttgttggaagggaaggctcagtggggaagcaacatgcaggtgactctgatcccaacacatgactctgaggtgatgagggagtggtaccaggagacccacgagaagcagcaagacctcaacatcatggtcctagcaagcagtagtacagtggtcatgcaagacgagtccttccctgcatgcaagatagaactgtagaaaccgcagccgaccacaccacaggatttgaactgtgtttccagaaattcctgaatttgaaactaccttttcttaaacgtccattcatctaattacgtcactgaacaaggacctgccagatgctatacagtgtcatggtgatgcaaatcactgatatttctcaatttttgccgaccgctaaggaaagtaaccatattcccacaatagatttcaagttactgcaaaattacctacccccgttcatctctgctgaaatacgtggaagccaggcactcgcacacctaactgacttctgctagggattggcatttatcttagagagagaaagagagagggaaagagagtcgtcttgcatgaccactgtactactgcttgctaggaccatgatgttgaggtcttgctgcttctcgtgggtctcctgaatcaaaaaaaaaaaaaaaattttttttttttttttaaaaacaactttccttgggggcaaattaacaagtagggtgagacactttgaatttaaaaaaaaattatttcattatttgtgtaaagttaaaagacttctaaaaatatccaaggacttaggattatgttcactgtgaaaagaacactaagaaattttctcagcaaatatgatctgagatagtcaattctaagaattc

SEQ ID NO: 14163 - protein, 2459 aa, Rattus norvegicus; identical to SEQ ID NO: 8646
  ref <308>: DATABASE ACCESSION NUMBER: SWISS-Prot / CAA34620
  ref <309>: DATABASE ENTRY DATE: 2002-06-15

SEQ ID NO: 14164 - DNA, 4190 bp, Rattus norvegicus
  ref <308>: DATABASE ACCESSION NUMBER: EMBL / X17607
  ref <309>: DATABASE ENTRY DATE: 1993-09-12
ctgcagcctgaacgcgggagaagcagccttgcagtgcaccctgcccgttatgtgcactagactttaggggacttgcccagtgacgtgcagcaactttgagccaatggcaccgtcgcatgcccggaggggcgaggcactaagggccaaccctccttgcctagcccgcctcctcctggggttggcccgggcggggcccaagctgctccccggaggccaggccaccactcccttccagctaccctagctggggctcccgagagagaaatctgggactgctgtgcgacccgccaaccacccaggcgctgtctggaagtgctacctgttcatgtaggtcacctgtgcgggttggaaggtctctggacgccagtggcagtgggtgcattttcttttaggaacagaaagaacaagctcacccggacacgcacacacaggcacaaacgcaccctgctgactgggacgtgctcagacttatgccgaaccacagccacagacaccgagacacacccgcgcccgctcatgctggagacgacagctgtctcctggtccaacacagagaggtggctataaacaaactcaggaacacccagaagcaagctgaaagaaacacacacaagggctccggtggagacatggagtgcggatcacttagacaccggtgttcacatccaggtactaccctcctctagcactcataaatgacacccccattcgcagacacccagtgtattccctttcagttatttggcaagaacacaggaggtgactccaacagctacagagtttctaagcacacttggtgaaaaatatttttttggcgtcctccctccttgagaacatgcaggcaaccgcaccaaggcagtaacttcgccctttgcatttctttaggaattgatgtgtacgcacttggggagagttggggtgggggtgttattcttaattcttgggagtgtggcatcatttttcttgttatatggtggatatccagggatgcattgaaaacgaaaatgcaagaattttctttttgaaaataaaaaaaaataaactacattacttatgttatgcgcatgggagtcttatctctgtgtttgtctgtgcaccacgtttgtgcatgttttggaggtcaggagaaagagagcatcagattccctaggactgaatatacagatagtatcaacacacaagctgcctttgtgagtgctggcaatcgaaccctggtcctctggaagtcagccaatgctcttaaccactgagctgtctctccagtctgcatgatcttcttttcaaacaatttcttaagtaactcctttgtaattataaaagtgttaactgtattaattgtatttgttggctggataattagctaatcttttaggctatgtcatgtgaacctgccaccactgggccttttctgtctttaaaaaacccccacaatttcatataattcattatattaaaaatgtgttttctgaagtccattttaaaactacagaaagaaaatgatagtttttccttcccatttaaaaaaaacatcagaccaagactaagatttcatgaaacaccaacctttgcagctggcaagtgactgttgcggaaaaaaattaattttcaaggtttgatttcacgtgtattatatttgatagaccaaaagtctttcacatggaataagcaaacatactttgtagattacataataacataacaatggctgacatttagggacattccgtttgtgcattattgcatttaatccttcccacaatcccacgggggtatttttagctccaatggggctcaaagaggcaaatcacttgcccatggacactggccaggcagcaccagaatctgaatcggaacctaaatctgtctgattctaaggtccatttccttgccacctttctaaggtactgtgttattccatgtagacgaggggagggcacagaagaagctacaactgggattggagcacctgagttgcaggttcaccttgaaactttgacaatcattttccttagtcaaaccacaaagaagggattagtatccctccatcctgaaggggatgtgctgcagctggcaggcatcgcgagcccggagcacccacgagctcagtgtgcaggacgcgcccccagcacagccacctacggtctctgaatgaagcttccaggagtccgcccccggacggctgcgccccatcggaggtgcacccgctgagagcgtctgggcactgaaagccggtgcgctcacctgcccggccatggagccacacgggaatgacagcgacttcttgctggcacccaatggaagccgagcgccaggccacgacatcactcaggaacgggacgaagcgtgggtggtgggcatggccatcctcatgtcggttatcgtcctggccatcgtgtttggcaacgtgctggtcatcacagccattgccaagttcgagcgactacaaaccgtcaccaactacttcataacctccttggcgtgtgctgatctagtcatgggcctagcggtggtgccttttggggccagtcatatccttatgaaaatgtggaattttggcaatttctggtgcgagttctggacttccattgatgtgttgtgcgtcacagccagcatcgagaccctgtgcgtgattgcagtggatcgctatgttgctatcacatcgcccttcaagtaccagagcctgctgaccaagaataaggcccgagtggtcatcctaatggtgtggattgtgtcgggccttacctccttcttgcctatccagatgcactggtaccgtgccacccacaagcaagccatcgactgttatgccaaggagacttgctgtgacttcttcacgaaccaggcctatgctatcgcttcctctatcgtatctttctacgtgcccctggtggtcatggtctttgtctattccagggtcttccaggtggccaaaaggcagctgcagaagatagacaaatccgagggcagatttcatgcccaaaacctcagccaggtggagcaggatgggaggagcgggcacggactccgaagttcctccaagttctgcttgaaagagcacaaagccctcaagactttaggcatcatcatgggcaccttcaccctctgctggctgcccttcttcattgtcaatattgtccacgtcatccgggccaacctcatccctaaggaagtttacatcctccttaactggttgggctatgtcaactctgccttcaatcctcttatctactgtcggagtccagatttcaggattgccttccaggagcttctgtgccttcgccggtcttcttcgaaaacctatgggaacggctactctagcaacagcaacggtaggacagactacacaggggagcagagcgcatatcagctggggcaggagaaagaaaatgaactgctttgtgaggaagcccctggcatggaaggctttgtgaactgtcaaggtactgtgcctagccttagcattgactctcaagggaggaactgtaacacaaacgactcgccactgtagtgtaggctttctactctttaagaacggcccctccctgacaggacactaaccagactattttacttgagtgtaataactttagaataaaattgtatagagattttgcagaaggggcacatccttctgccttttttattttaggtttttaagctgcaagtgagagagagagggagagagagcagagagagagagagaagaaagagagagagagagactgtatttcagtgcttaatgttttccttgtacagttcagttcctctttgccatggaacttaaaagtttctgtctgaagtgtttgttggtctgtctgtttggacggtgtttccatgtatctacctcactggtcaagtattaaggataatatatatatatattgctgctgaaattcatatgtaaaggagagagttttcttcctgtacccttggacttgaaatatcctgtgttcttggacctttctgctgtgaatgtggactctctctcactccacttattcgctcaaatggagtgttgaaggcagggatttgagggacaacatcagttgtttttctgagcaaagtctaaagtttacagtaaataaattgtttgaccatgacttcattgcaacctgtttctccaaaacctcttgactctggagtgtccttgtctctcccactggaaaccacaggtaactatgtgtcataac

SEQ ID NO: 14165 - protein, 418 aa, Rattus norvegicus
  ref <308>: DATABASE ACCESSION NUMBER: SWISS-Prot / CAA35609
  ref <309>: DATABASE ENTRY DATE: 2002-06-15
MEPHGNDSDFLLAPNGSRAPGHDITQERDEAWVVGMAILMSVIVLAIVFGNVLVITAIAKFERLQTVTNYFITSLACADLVMGLAVVPFGASHILMKMWNFGNFWCEFWTSIDVLCVTASIETLCVIAVDRYVAITSPFKYQSLLTKNKARVVILMVWIVSGLTSFLPIQMHWYRATHKQAIDCYAKETCCDFFTNQAYAIASSIVSFYVPLVVMVFVYSRVFQVAKRQLQKIDKSEGRFHAQNLSQVEQDGRSGHGLRSSSKFCLKEHKALKTLGIIMGTFTLCWLPFFIVNIVHVIRANLIPKEVYILLNWLGYVNSAFNPLIYCRSPDFRIAFQELLCLRRSSSKTYGNGYSSNSNGRTDYTGEQSAYQLGQEKENELLCEEAPGMEGFVNCQGTVPSLSIDSQGRNCNTNDSPL

SEQ ID NO: 14166 - DNA, 3447 bp, Homo sapiens
cccgggttcaagagattctcctgtctcagcctcccgagtagctgggactacaggtacgtgccaccacacctggctaatttttgtatttttagtagagacaagagttacaccatattggccaggatcttttgctttctatagcttcaaaatgttcttaatgttaagacattcttaatactctgaaccatatgaatttgccattttggtaagtcacagacgccagatggtggcaatttcacatggcacaacccgaaagattaacaaactatccagcagatgaaaggattttttttagtttcattgggtttactgaagaaattgtttgaattctcattgcatctccagttcaacagataatgagtgagtgatgccacactctcaagagttaaaaacaaaacaacaaaaaaattaaaacaaaagcacacaactttctctctctgtcccaaaatacatacttgcatacccccgctccagataaaatccaaagggtaaaactgtcttcatgcctgcaaattcctaaggagggcacctaaagtacttgacagcgagtgtgctgaggaaatcagcagctgttgaagtcacctcctgtgctcttgccaaatgtttgaaagggaatacactgggttaccgggtgtatgttgggaggggagcattatcagtgctcgggtgaggcaagttcggagtacccagatggagacatccgtgtctgtgtcgctctggatgcctccaagccagcgtgtgtttactttctgtgtgtgtcaccatgtctttgtgcttctgggtgcttctgtgtttgtttctggccgcgtttctgtgttggacaggggtgactttgtgccggatggcttctgtgtgagagcgcgcgcgagtgtgcatgtcggtgagctgggagggtgtgtctcagtgtctatggctgtggttcggtataagtctgagcatgtctgccagggtgtatttgtgcctgtatgtgcgtgcctcggtgggcactctcgtttccttccgaatgtggggcagtgccggtgtgctgccctctgccttgagacctcaagccgcgcaggcgcccagggcaggcaggtagcggccacagaagagccaaaagctcccgggttggctggtaaggacaccacctccagctttagccctctggggccagccagggtagccgggaagcagtggtggcccgccctccagggagcagttgggccccgcccgggccagccccaggagaaggagggcgaggggaggggagggaaaggggaggagtgcctcgccccttcgcggctgccggcgtgccattggccgaaagttcccgtacgtcacggcgagggcagttcccctaaagtcctgtgcacataacgggcagaacgcactgcgaagcggcttcttcagagcacgggctggaactggcaggcaccgcgagcccctagcacccgacaagctgagtgtgcaggacgagtccccaccacacccacaccacagccgctgaatgaggcttccaggcgtccgctcgcggcccgcagagccccgccgtgggtccgcccgctgaggcgcccccagccagtgcgctcacctgccagactgcgcgccatggggcaacccgggaacggcagcgccttcttgctggcacccaatggaagccatgcgccggaccacgacgtcacgcaggaaagggacgaggtgtgggtggtgggcatgggcatcgtcatgtctctcatcgtcctggccatcgtgtttggcaatgtgctggtcatcacagccattgccaagttcgagcgtctgcagacggtcaccaactacttcatcacttcactggcctgtgctgatctggtcatgggcctggcagtggtgccctttggggccgcccatattcttatgaaaatgtggacttttggcaacttctggtgcgagttttggacttccattgatgtgctgtgcgtcacggccagcattgagaccctgtgcgtgatcgcagtggatcgctactttgccattacttcacctttcaagtaccagagcctgctgaccaagaataaggcccgggtgatcattctgatggtgtggattgtgtcaggccttacctccttcttgcccattcagatgcactggtaccgggccacccaccaggaagccatcaactgctatgccaatgagacctgctgtgacttcttcacgaaccaagcctatgccattgcctcttccatcgtgtccttctacgttcccctggtgatcatggtcttcgtctactccagggtctttcaggaggccaaaaggcagctccagaagattgacaaatctgagggccgcttccatgtccagaaccttagccaggtggagcaggatgggcggacggggcatggactccgcagatcttccaagttctgcttgaaggagcacaaagccctcaagacgttaggcatcatcatgggcactttcaccctctgctggctgcccttcttcatcgttaacattgtgcatgtgatccaggataacctcatccgtaaggaagtttacatcctcctaaattggataggctatgtcaattctggtttcaatccccttatctactgccggagcccagatttcaggattgccttccaggagcttctgtgcctgcgcaggtcttctttgaaggcctatgggaatggctactccagcaacggcaacacaggggagcagagtggatatcacgtggaacaggagaaagaaaataaactgctgtgtgaagacctcccaggcacggaagactttgtgggccatcaaggtactgtgcctagcgataacattgattcacaagggaggaattgtagtacaaatgactcactgctgtaaagcagtttttctacttttaaagacccccccccccaacagaacactaaacagactatttaacttgagggtaataaacttagaataaaattgtaaaattgtatagagatatgcagaaggaagggcatccttctgccttttttatttttttaagctgtaaaaagagagaaaacttatttgagtgattatttgttatttgtacagttcagttcctctttgcatggaatttgtaagtttatgtctaaagagctttagtcctagaggacctgagtctgctatattttcatgacttttccatgtatctacctcactattcaagtattaggggtaatatattgctgctggtaatttgtatctgaaggagattttccttcctacacccttggacttgaggattttgagtatctcggacctttcagctgtgaacatggactcttcccccactcctcttatttgctcacacggggtattttaggcagggatttgaggagcagcttcagttgttttcccgagcaaagtctaaagtttacagtaaataaattgtttgaccatgccttcattgcacctgtttctccaaaaccccttgactggagtgctgttgcctcccccactggaaaccgc

SEQ ID NO: 14167 - protein, 413 aa, Homo sapiens [sequence omitted]

SEQ ID NO: 14168 - DNA, 2376 bp, Rattus norvegicus; identical to SEQ ID NO: 9505
  ref <308>: DATABASE ACCESSION NUMBER: EMBL / X51615
  ref <309>: DATABASE ENTRY DATE: 1992-03-05

SEQ ID NO: 14169 - protein, 261 aa, Rattus norvegicus; identical to SEQ ID NO: 9506
  ref <308>: DATABASE ACCESSION NUMBER: SWISS-Prot / AAD50911
  ref <309>: DATABASE ENTRY DATE: 2002-10-01

SEQ ID NO: 14170 - DNA, 936 bp, Rattus norvegicus; identical to SEQ ID NO: 9529
  ref <308>: DATABASE ACCESSION NUMBER: EMBL / X53052
  ref <309>: DATABASE ENTRY DATE: 1990-08-17

SEQ ID NO: 14171 - protein, 261 aa, Rattus norvegicus; identical to SEQ ID NO: 9530
  ref <308>: DATABASE ACCESSION NUMBER: SWISS-Prot / CAA37219
  ref <309>: DATABASE ENTRY DATE: 2002-06-15

SEQ ID NO: 14172 - DNA, 1019 bp, Homo sapiens; identical to SEQ ID NO: 9531
  ref <308>: DATABASE ACCESSION NUMBER: Refseq / NM_012064
  ref <309>: DATABASE ENTRY DATE: 2002-11-05

SEQ ID NO: 14173 - protein, 263 aa, Homo sapiens; identical to SEQ ID NO: 9532
  ref <308>: DATABASE ACCESSION NUMBER: Refseq / NP_036196
  ref <309>: DATABASE ENTRY DATE: 2002-11-05

SEQ ID NO: 14174 - DNA, 5731 bp, Rattus norvegicus
  ref <308>: DATABASE ACCESSION NUMBER: EMBL / X53455
  ref <309>: DATABASE ENTRY DATE: 1990-12-06
gaattccacataacaaacgtcattactttacaacttgattaggagacagtacagagatctgaaggatggctgacgagaggaaagacgaaggaaaggcaccacactggacatcagcctcactcacagaggcagctgcacacccccactcgccagagatgaaggaccagggaggctcaggggaagggctgagccgcagcgccaatggatttccatacagagaggaggaggaaggcgcctttggggagcacgggtcacagggcacctattcagataccaaagagaacgggatcaacggagagctgacctcagctgacagagaaacagcagaggaagtgtctgcaaggatagttcaagtagtcacagctgaagctgtagcagtcctgaaaggtgaacaagagaaggaggcccaacacaaggatcagcctgcagctctgcctttagcagctgaagaaacagttaatctgccaccttccccaccaccatcgccagcatcagaacaaacagctgcactggaagaagatttacttacagcctcgaagatggaattccctgagcagcagaaattgccttcctcattcgctgagcctttagacaaggaggaaacggagtttaagatgcaaagtaagcctggtgaagactttgaacacgctgccttagttcctcagccggacacaagtaaaactccccaggataaaaaggatccccaagacatggaaggagaaaagtcgcctgccagtccatttgcgcagactttcggtaccaacctggaagacataaaacagatcacagaaccaagcataacagtacctagcattggcctctccgcagagcccctagctccaaaagatcagaaagactggttcatcgaaatgcccgtggaatcaaagaaggatgaatggggtttagctgccccaatatctcctggccccttgacacccatgagggaaaaagatgtgctggaggatatcccaagatgggaaggaaagcagtttgactctcccatgcctagccccttccacggtggaagtttcactcttcccttagatactgtgaaagatgagagagtcacagaagggtcacaaccctttgcccctgtcttcttccaatcagatgacaaaatgtctctgcaggacaccagtggttcagctacttccaaagagagttctaaagatgaagagccacagaaagataaagcagacaaagtggcagatgttcctgtctcagaagctaccactgtactgggagatgttcacagtccagctgtggaaggctttgtcggggagaacatttcaggagaagaaaagggtaccacagatcaagagaaaaaagagacttcgacacccagtgtacaggaacctacactcactgaaactgaaccacagacaaagcttgaagagacatcaaaggtttccatcgaagaaactgtggcaaaagaagaggaatccttgaaattaaaagatgataaagcaggtgtaattcagacttccaccgagcattctttctccaaagaagaccagaaaggcgaagaacagacaatcgaagcattaaaacaagactcctttcctataagtctagaacaggcagttacagatgcagccatggccaccaagaccttggaaaaggttacgtctgagccagagcgagtaagtgaaaagagagaaatccagggactttttgaagaggatatagctgacaagagtaagctcgaaggcgctgggtctgcaacagtagccgaggttgagatgccattttatgaagataaatcagggatgtccaagtactttgaaacatctgcattgaaagaagatgtgaccagaagcactgggttgggcagtgattactacgagctgagtgactcaagaggaaatgcccaggaatctcttgatactgtatctcccaagaaccaacaagatgaaaaggaacttctggcaaaagcttcccagcctagtcctccagcacacgaagcagggtacagcactcttgcccagagttatacatctgatcatccgtccgagttacctgaagaaccaagttctcctcaagaaagaatgttcactattgtccccaaagtttataaggagaaaagggaccttcatagtaagaacaaagatgatctgacacttagtcgaagcttggggctgggtggaaggtctgcaatagaacagagaagcatgtccattaacttgcctatgtcttgccttgattctattgcccttgggtttaactttggccggggccatgatctttcccctctggcttctgatattctaaccaacactagcggaagcatggatgaaggagatgattacctgccccccaccacacctgcagtggagaagattccttgctttccaatagagagcaaagaggaagaagataagacagagcaagcaaaagtgactggagggcaaactacccaagttgaaacatcctccgagtcacccttcccagccaaagaatattacaaaaatggcactgtcatggcccctgacctgcctgagatgctagatctagcagggaccaggtccagattagcttctgtgagtgcagatgctgaggttgccaggaggaaatcagtcccatcggaggctgtggttgcagagagcagtactggtttgccacctgttgctgatgacagccaacccgtaaaaccagacagtcaacttgaagacatggggtaccgtgtgttcaacaagtacacagtccctctcccatcgccagttcaagacagtgagaatttgtcaggagagagtggttcgttttatgaaggaaccgatgacaaagtccgtagagatttggccactgacctttcactaattgaggtaaaacttgcagctgctggaagagtcaaagatgaattcactgctgagaaagaggcatctccaccctcttctgctgacaaatcaggactgagtagggagtttgaccaagacaggaaagctaatgacaagctggatactgtcctagaaaagagcgaagagcatgttgattcaaaagaacatgccaaggagtcagaagaggttggggataaagtagagctcttcggattaggtgtaacctatgagcaaacctctgccaaagaactgataacaactaaagaaacagcacctgagagagcagagaaaggtctcagttcagtgccagaggtagctgaggtagaaacaaccacaaaagctgaccaaggtctagatgttgctgccaagaaagatgatcagagtccattagatataaaagtcagtgactttggacagatggcttctgggatgagtgtagatgctgggaaaaccatagagcttaagttcgaggttgatcagcagctgactctctcatccgaagcacctcaggaaacagattcattcatgggtattgagtccagccacgtgaaggatggtgccaaagtcagtgaaacagaagtcaaagagaaggtggcaaagcctgacttggtgcatcaggaggctgtggacaaagaagagtcctatgagtctagtggtgagcatgaaagcctcaccatggagtccctgaagcctgatgagggcaagaaagaaacatctccagagacatcactgatacaagatgaagttgccctcaaactgtctgtagaaatcccttgcccacctccagtttccgaagctgattcatccattgatgagaaggcggaggtccagatggaatttattcagctgccaaaggaagagagcacagagactccggatatacctgccataccttctgatgtcacccagccacagcctgaagcacttgtgtccgaaccagcagaggttcgaggtgaggaagaagagatcgaagctgagggagaatatgacaaactgctcttccgctcagacaccctccagatcaccgacctgcttgttccaggaagtagggaggagtttgtggagacctgcccaggggagcacaaaggtgtggttgagtccgtggtaaccatcgaggatgatttcatcactgtagtacaaaccacgactgatgagggagagttgggatcccacagtgtgcgctttgcagctccagttcagcctgaggaagaaaggagaccataccctcatgatgaagagcttgaagtactgatggcagcagaagcccaggcagagcccaaggatggctctccagatgctccagctacccctgagaaagaagaggttccattctcagaatataaaacagaaacctacgacgattacaaagatgagaccaccattgatgactccattatggatgccgacagcctgtgggtggacactcaagatgatgatagaagcatcttgacagagcagttagaaactattcctaaagaggagagagctgagaaggaagctcggagaccgtctctcgagaaacatagaaaagaaaaaccttttaaaactgggagaggcagaatttccactcctgaaagaaaagtagctaaaaaggaacctagcacggtctccagggatgaagtgagaaggaaaaaagcagtttataagaaggctgaacttgctaaaaaatcagaagttcaggcccactctccttccaggaaactcattttaaaacctgctatcaaatacactagaccaactcatctctcctgtgttaagcggaaaaccacagcaacaagtggtgaatcagctcaggctcccagtgcgtttaaacaggcgaaggacaaagtcactgatggaataaccaagagcccagaaaaacgttcttccctcccaagaccttcctccatcctccctcctcgcaggggcgtatcaggagacagggaggagaactcgttctctctgaacagctccatctcttcagcacgacggaccaccaggtcagaaccaattcgcagagcaggaaaaagcggcacctcaacacctactacccctggatctactgcaatcacccctggcactcctccaagctactcttcacgtaccccaggcacccctggaaccccgagctatcccaggacaccaggaacccccaaatctggcatcttggtgccaagtgagaaagttgccatcattcgcactcctccaaagtccccagctactcccaagcagcttcggctcattaaccaacctctgccagacctgaagaacgtcaagtccaaaatcggatcaaccgacaacatcaaataccagcctaaggggggtcaggtacaaattgttactaagaagatagacttaagccatgtgacttccaaatgtggctctctaaagaacatccgtcacaggccaggtggtggacgcgtgaagattgagagtgtaaagctggatttcaaggagaaggcccaagctaaagttggctcacttgacaatgctcaccatgtacctggaggtggtaacgtgaagattgacagccaaaagctgaacttccgagagcatgcaaaggcccgcgtcgaccacggggctgagatcatcacacagtcgccaagcaggtcaagcgtggcgtctccccggcgactcagcaatgtctcctcttctggaagcatcaacctgctcgaatcccctcagctggccactttggctgaggacgtcactgcggcgctcgctaagcagggcttgtgaatccttctcatctagcactgaagtaccatttaggcatgagctcttggcaggagtgggctctgagcaggtgtcatattcattctttacaaaccatagataaataatctcatcccccaactgtagtaattgttacaattttatataaaaaaaaaagatagtatatgcagaaaatggaattc

SEQ ID NO: 14175 - protein, 1828 aa, Rattus norvegicus
  ref <308>: DATABASE ACCESSION NUMBER: SWISS-Prot / CAA37535
  ref <309>: DATABASE ENTRY DATE: 2003-02-01
MADERKDEGKAPHWTSASLTEAAAHPHSPEMKDQGGSGEGLSRSANGFPYREEEEGAFGEHGSQGTYSDTKENGINGELTSADRETAEEVSARIVQVVTAEAVAVLKGEQEKEAQHKDQPAALPLAAEETVNLPPSPPPSPASEQTAALEEDLLTASKMEFPEQQKLPSSFAEPLDKEETEFKMQSKPGEDFEHAALVPQPDTSKTPQDKKDPQDMEGEKSPASPFAQTFGTNLEDIKQITEPSITVPSIGLSAEPLAPKDQKDWFIEMPVESKKDEWGLAAPISPGPLTPMREKDVLEDIPRWEGKQFDSPMPSPFHGGSFTLPLDTVKDERVTEGSQPFAPVFFQSDDKMSLQDTSGSATSKESSKDEEPQKDKADKVADVPVSEATTVLGDVHSPAVEGFVGENISGEEKGTTDQEKKETSTPSVQEPTLTETEPQTKLEETSKVSIEETVAKEEESLKLKDDKAGVIQTSTEHSFSKEDQKGEEQTIEALKQDSFPISLEQAVTDAAMATKTLEKVTSEPERVSEKREIQGLFEEDIADKSKLEGAGSATVAEVEMPFYEDKSGMSKYFETSALKEDVTRSTGLGSDYYELSDSRGNAQESLDTVSPKNQQDEKELLAKASQPSPPAHEAGYSTLAQSYTSDHPSELPEEPSSPQERMFTIVPKVYKEKRDLHSKNKDDLTLSRSLGLGGRSAIEQRSMSINLPMSCLDSIALGFNFGRGHDLSPLASDILTNTSGSMDEGDDYLPPTTPAVEKIPCFPIESKEEEDKTEQAKVTGGQTTQVETSSESPFPAKEYYKNGTVMAPDLPEMLDLAGTRSRLASVSADAEVARRKSVPSEAVVAESSTGLPPVADDSQPVKPDSQLEDMGYRVFNKYTVPLPSPVQDSENLSGESGSFYEGTDDKVRRDLATDLSLIEVKLAAAGRVKDEFTAEKEASPPSSADKSGLSREFDQDRKANDKLDTVLEKSEEHVDSKEHAKESEEVGDKVELFGLGVTYEQTSAKELITTKETAPERAEKGLSSVPEVAEVETTTKADQGLDVAAKKDDQSPLDIKVSDFGQMASGMSVDAGKTIELKFEVDQQLTLSSEAPQETDSFMGIESSHVKDGAKVSETEVKEKVAKPDLVHQEAVDKEESYESSGEHESLTMESLKPDEGKKETSPETSLIQDEVALKLSVEIPCPPPVSEADSSIDEKAEVQMEFIQLPKEESTETPDIPAIPSDVTQPQPEALVSEPAEVRGEEEEIEAEGEYDKLLFRSDTLQITDLLVPGSREEFVETCPGEHKGVVESVVTIEDDFITVVQTTTDEGELGSHSVRFAAPVQPEEERRPYPHDEELEVLMAAEAQAEPKDGSPDAPATPEKEEVPFSEYKTETYDDYKDETTIDDSIMDADSLWVDTQDDDRSILTEQLETIPKEERAEKEARRPSLEKHRKEKPFKTGRGRISTPERKVAKKEPSTVSRDEVRRKKAVYKKAELAKKSEVQAHSPSRKLILKPAIKYTRPTHLSCVKRKTTATSGESAQAPSAFKQAKDKVTDGITKSPEKRSSLPRPSSILPPRRGVSGDREENSFSLNSSISSARRTTRSEPIRRAGKSGTSTPTTPGSTAITPGTPPSYSSRTPGTPGTPSYPRTPGTPKSGILVPSEKVAIIRTPPKSPATPKQLRLINQPLPDLKNVKSKIGSTDNIKYQPKGGQVQIVTKKIDLSHVTSKCGSLKNIRHRPGGGRVKIESVKLDFKEKAQAKVGSLDNAHHVPGGGNVKIDSQKLNFREHAKARVDHGAEIITQSPSRSSVASPRRLSNVSSSGSINLLESPQLATLAEDVTAALAKQGL

SEQ ID NO: 14176 - DNA, 6628 bp, Homo sapiens
gggataatgctcccggagaaggattctgcagcagttctcaaaggctagacttgagtggtattgctgcatatgcgctgattcttcagcttgtctctaaccgaggaagcattgattgggagctactcattcagaaaattaaaagaaagaagccagaaaatattatcaaccctttgagaacacgacacaacgaactttatattttaccacttccttgaatagttgcaggagaaataacaaggcattgaagaatggcagatgaacggaaagatgaagcaaaggcacctcactggacctcagcaccgctaacagaggcatctgcacactcacatccacctgagattaaggatcaaggcggagcaggggaaggacttgtccgaagcgccaatggattcccatacagggaggatgaagagggtgcctttggagagcatgggtcacagggcacctattcaaataccaaagagaatgggatcaacggagagctgacctcagctgacagagaaacagcagaggaggtgtctgcaaggatagttcaagtagtcactgctgaggctgtagcagtcctgaaaggtgaacaagagaaagaagctcaacataaagaccagactgcagctctgcctttagcagctgaagaaacagctaatctgcctccttctccacccccatcacctgcctcagaacagactgtcacagtggaggaagatttacttacagcctcgaagatggagttccacgatcaacaggaattgactccctctacagctgagccttcagaccagaaggaaaaggagtcagagaagcaaagtaagcctggtgaagaccttaaacatgctgccttagtttctcagccagagacaactaaaacttaccctgataaaaaggacatgcaaggcacggaagaagaaaaagcacccctagctttgtttgggcacactcttgttgccagcctggaagacatgaaacagaagacagaaccaagccttgtagtacctggcattgacctccctaaagagcctccaactccaaaagaacaaaaggactggttcatcgaaatgccaacggaagcaaaaaaggatgagtggggtttagttgcccccatatctcctggccctctgactcccatgagggaaaaagatgtatttgatgatatcccaaaatgggaagggaaacagtttgattctcccatgccaagtccctttcaagggggaagcttcactcttcctttagatgtcatgaagaatgaaatagttacagaaacatcgccctttgcccctgcctttttacagccagatgacaaaaaatctctgcaacaaaccagtggcccagctactgccaaagatagttttaaaattgaagagccccatgaggctaaacctgacaaaatggcagaagcaccaccctcagaggcaatgaccttacccaaagatgctcacattccagttgtagaagaacatgttatggggaaagttttagaggaagaaaaggaggccataaatcaagagactgtgcagcaaagggatactttcacccccagtggacaggaacctatacttactgaaaaggaaactgagctgaagcttgaagaaaaaaccaccatttctgacaaagaagctgtgccaaaagagagtaaacccccaaaacctgcagatgaagaaataggcataattcagacctccacagagcacactttctcagaacagaaagaccaagagcctaccacagatatgttgaaacaggactcgttccctgtaagtttggagcaagcagttacagattcagccatgacctctaaaacactggagaaagccatgaccgaaccatctgcattaattgaaaagagctcaattcaggaactttttgaaatgagagttgatgacaaagataagattgaaggagttggagctgcaacatcagctgagcttgatatgccattttatgaagataaatcaggaatgtccaagtactttgaaacatctgccttgaaagaagaagcaacaaaaagcattgagccaggcagtgattactatgaactgagtgacactagagaaagtgtccatgagtctattgataccatgtctcccatgcataaaaatggtgacaaggagtttcaaacaggaaaagaatcccagcccagtcctccagcacaagaagcagggtacagcactctcgcacagagttatccatcagatttacctgaagaacccagttctcctcaagaaagaatgttcactattgatccaaaagtgtatggagagaaaagggacctccacagtaagaataaggatgatttgacccttagcaggagtttaggacttggtggtaggtctgcaatagaacaaagaagcatgtcaatcaatttgccgatgtcttgcctagattccatagcccttggatttaactttggtcggggacatgatctttctcctctggcttccgatattctaaccaacactagtggaagtatggatgaaggggatgattaccttccagccaccacacctgcactggagaaagccccttgcttccctgtagaaagcaaagaggaagaacagatagagaaagtaaaagctactggagaagaaagtactcaagcggagatatcatgtgagtctcctttcctagccaaagatttttacaaaaatggtactgtcatggcacctgaccttcctgaaatgctagatctggcaggcacaaggtcaagattggcttctgtgagtgcagatgctgaggttgccaggaggaaatcagtcccatcagagactgtggttgaggatagtcgtactggcttgcccccggtaactgatgaaaaccatgtcattgtaaaaacggacagtcagctcgaagacctgggctactgtgtgttcaataagtacacagtcccattgccatcacctgttcaagacagtgagaatttatcaggggagagtggtaccttttacgaaggcactgatgataaagttcgaagagatttggccacagacctttcactgattgaagtgaaactggcagcagccggaagagtcaaagatgagttcagtgttgacaaagaagcatccgcgcatatctctggtgacaaatcaggactgagtaaggagtttgaccaagagaagaaagctaatgataggttggatactgtactagaaaagagtgaagaacatgctgattcaaaagaacatgccaagaaaactgaagaggctggtgatgaaatagaaacattcggattaggagtaacctatgagcaagctttggccaaagatttgtcaataccaacagatgcatcctctgagaaagcagagaagggtcttagttcagtgccagagatagctgaggtagaaccatccaaaaaggtggaacaaggtctggattttgctgtccagggtcaactagatgttaaaattagtgactttggacagatggcttcagggctaaacatagatgatagaagggcaacagagctaaaacttgaggctacacaggacatgaccccctcatccaaagcaccgcaggaggcagatgcatttatgggtgttgagtctggccacatgaaagaaggcactaaagttagtgagacagaagtcaaagagaaggtggccaagcctgacttggtgcaccaggaggctgtagacaaggaggagtcctatgaatctagtggtgagcatgaaagtctcaccatggagtccttgaaagctgatgagggcaagaaggaaacatctccagaatcatctctaattcaagatgagattgccgtcaaattgtcagtggaaataccttgcccacctgctgtttcagaggctgatttagccacagatgagagagctgatgtccagatggaatttattcaggggccaaaagaagaaagcaaagagaccccagatatatccatcacgccttctgatgttgcagagccattgcatgaaacgatcgtatctgaaccagcagagattcagagtgaggaagaagagatagaagcccagggagaatatgataaactgctcttccgctcagacacccttcagataactgacctgggtgtctcaggtgccagggaggaatttgtggagacctgcccaagtgaacacaaaggagtgattgagtctgttgtgaccatcgaggatgatttcatcactgtagtgcaaaccacaactgatgaaggggagtcagggtcccacagcgtgcgttttgcagccctagagcagcctgaggtggaaaggagaccatctcctcatgatgaagaagagtttgaagtagaagaggcagctgaagcccaggcagaacccaaagatggttccccagaggctccagcttcccctgagagagaagaggttgcactttctgaatataagacagaaacctatgacgattacaaagatgagaccaccattgacgactccatcatggacgctgacagcctctgggtggacactcaagatgatgataggagcatcatgacagaacagttagaaactattcctaaagaggagaaagctgaaaaggaagctcggagatcatctcttgagaaacatagaaaagaaaagccttttaaaaccgggagaggcagaatttccactcctgaaagaaaagtagctaaaaaggaacctagcacagtctccagagatgaagtgagaaggaaaaaagcagtttataagaaggctgaacttgctaaaaaaacagaagttcaggcccactctccctccaggaaattcattttaaaacctgctatcaaatatactagaccaactcatctctcctgtgttaagcggaaaaccacagcagcaggtggggaatcagctctggctcccagtgtatttaaacaggcaaaggacaaagtctctgacggagtaaccaagagcccagaaaagcgctcttctctcccaagaccttcctccattctccctcctcggcgaggtgtgtcaggagacagagatgagaattccttctctctcaacagttctatctcttcttcagcacggcggaccaccaggtcagagccaattcgcagagcagggaagagtggtacctcaacacccactacccctgggtctactgccatcactcctggcaccccaccaagttattcttcacgcacaccaggcactcctggaacccctagctatcccaggacccctcacacaccaggaacccccaagtctgccatcttggtgccgagtgagaagaaggtcgccatcatacgtactcctccaaaatctcctgcgactcccaagcagcttcggcttattaaccaaccactgccagacctgaagaatgtcaaatccaaaatcggatcaacagacaacatcaaataccagcctaaaggggggcaggttaggattttaaacaagaagatcgattttagcaaagttcagtccagatgtggttccaaggataacatcaaacattcggctgggggcggaaatgtacaaattgttaccaagaaaatagacctaagccatgtgacatccaaatgtggctctctgaagaacatccgccacaggccaggtggcggacgtgtgaaaattgagagtgtaaaactagatttcaaagaaaaggcccaagctaaagttggttctcttgataatgctcatcatgtacctggaggtggtaatgtcaagattgacagccaaaagttgaacttcagagagcatgctaaagcccgtgtggaccatggggctgagatcattacacagtccccaggcagatccagcgtggcatcaccccgacgactcagcaatgtctcctcgtctggaagcatcaacctgctcgaatctcctcagcttgccactttggctgaggatgtcactgctgcactcgctaagcagggcttgtgaatatttctcatttagcattgaaataataatatttaggcatgagctcttggcaggagtgggctctgagcagttgttatattcattctttataaaccataaaataaataatctcatccccaaactgtagtaattgttacaattttctatttaaaaaatgaatagtacatgcagaaattgacctgatttccatttgcaacaggaagacactggctttacatgggttcaattggacaattatttttgctctgctctgttttgcatggagtattattattttaaaaattgcatttttacctttcatgtgcctgaaggctatccactacattctgaaggccttgttaaaatccaagctgctcatttcactattctgtttctgagtgagaagataaaaactgcccattgtaacttatttcaggttaaattaaaccaaggagtctgattgcaggaagggaagagcatgtaagaaataagtttttttaaagtgttattttgtataaatgggaagaaagattcaattaagttattaacatttgggacctggataattatatcagagtatgtcagtccaataaattatttaactaattaaaaaatagttgcaaagcatttgagctgtggttgaggaagtggtgtttagaatgtcagttgatcagctagatttgtgtccacactaccagtttcacaccccctttccatctgtttgatacagtattatagatataaatatatatatatttctctgtggccatttgtgatacttcctcatatacttgaatattatacttctttattcacagtatctg

SEQ ID NO: 14177 - protein, 1858 aa, Homo sapiens
MADERKDEAKAPHWTSAPLTEASAHSHPPEIKDQGGAGEGLVRSANGFPYREDEEGAFGEHGSQGTYSNTKENGINGELTSADRETAEEVSARIVQVVTAEAVAVLKGEQEKEAQHKDQTAALPLAAEETANLPPSPPPSPASEQTVTVEEDLLTASKMEFHDQQELTPSTAEPSDQKEKESEKQSKPGEDLKHAALVSQPETTKTYPDKKDMQGTEEEKAPLALFGHTLVASLEDMKQKTEPSLVVPGIDLPKEPPTPKEQKDWFIEMPTEAKKDEWGLVAPISPGPLTPMREKDVFDDIPKWEGKQFDSPMPSPFQGGSFTLPLDVMKNEIVTETSPFAPAFLQPDDKKSLQQTSGPATAKDSFKIEEPHEAKPDKMAEAPPSEAMTLPKDAHIPVVEEHVMGKVLEEEKEAINQETVQQRDTFTPSGQEPILTEKETELKLEEKTTISDKEAVPKESKPPKPADEEIGIIQTSTEHTFSEQKDQEPTTDMLKQDSFPVSLEQAVTDSAMTSKTLEKAMTEPSALIEKSSIQELFEMRVDDKDKIEGVGAATSAELDMPFYEDKSGMSKYFETSALKEEATKSIEPGSDYYELSDTRESVHESIDTMSPMHKNGDKEFQTGKESQPSPPAQEAGYSTLAQSYPSDLPEEPSSPQERMFTIDPKVYGEKRDLHSKNKDDLTLSRSLGLGGRSAIEQRSMSINLPMSCLDSIALGFNFGRGHDLSPLASDILTNTSGSMDEGDDYLPATTPALEKAPCFPVESKEEEQIEKVKATGEESTQAEISCESPFLAKDFYKNGTVMAPDLPEMLDLAGTRSRLASVSADAEVARRKSVPSETVVEDSRTGLPPVTDENHVIVKTDSQLEDLGYCVFNKYTVPLPSPVQDSENLSGESGTFYEGTDDKVRRDLATDLSLIEVKLAAAGRVKDEFSVDKEASAHISGDKSGLSKEFDQEKKANDRLDTVLEKSEEHADSKEHAKKTEEAGDEIETFGLGVTYEQALAKDLSIPTDASSEKAEKGLSSVPEIAEVEPSKKVEQGLDFAVQGQLDVKISDFGQMASGLNIDDRRATELKLEATQDMTPSSKAPQEADAFMGVESGHMKEGTKVSETEVKEKVAKPDLVHQEAVDKEESYESSGEHESLTMESLKADEGKKETSPESSLIQDEIAVKLSVEIPCPPAVSEADLATDERADVQMEFIQGPKEESKETPDISITPSDVAEPLHETIVSEPAEIQSEEEEIEAQGEYDKLLFRSDTLQITDLGVSGAREEFVETCPSEHKGVIESVVTIEDDFITVVQTTTDEGESGSHSVRFAALEQPEVERRPSPHDEEEFEVEEAAEAQAEPKDGSPEAPASPEREEVALSEYKTETYDDYKDETTIDDSIMDADSLWVDTQDDDRSIMTEQLETIPKEEKAEKEARRSSLEKHRKEKPFKTGRGRISTPERKVAKKEPSTVSRDEVRRKKAVYKKAELAKKTEVQAHSPSRKFILKPAIKYTRPTHLSCVKRKTTAAGGESALAPSVFKQAKDKVSDGVTKSPEKRSSLPRPSSILPPRRGVSGDRDENSFSLNSSISSSARRTTRSEPIRRAGKSGTSTPTTPGSTAITPGTPPSYSSRTPGTPGTPSYPRTPHTPGTPKSAILVPSEKKVAIIRTPPKSPATPKQLRLINQPLPDLKNVKSKIGSTDNIKYQPKGGQVRILNKKIDFSKVQSRCGSKDNIKHSAGGGNVQIVTKKIDLSHVTSKCGSLKNIRHRPGGGRVKIESVKLDFKEKAQAKVGSLDNAHHVPGGGNVKIDSQKLNFREHAKARVDHGAEIITQSPGRSSVASPRRLSNVSSSGSINLLESPQLATLAEDVTAALAKQGL

SEQ ID NO: 14178 - DNA, 2299 bp, Rattus norvegicus
  ref <308>: DATABASE ACCESSION NUMBER: EMBL / X56327
  ref <309>: DATABASE ENTRY DATE: 1999-08-25
ctttcccatctttgtctatgcttgaacttcagtctactagtccctctaagtctgaaacaaaaaggaaagattggaaaagacacccttgcaaatctcctgttgggagaaggaaccaaacagaaagaaagaaggaaagaaagagtaaatgctgtgaaaactgcagcaggagggctctttttcccaggcagggggtctacttgacactatcttagtaggaatgctatctaagtcttaccctcctggaccccacccctttctttcccagcctgttttgaccaatagtctcagagtcctgggggaggggaagtggggaaaagttcaggatgaagagtaaaaggacaggccttcagtctcttaaacacacttgcttctgcacacctgagattatttccaagcttctagacctcacaccatggttcacttcacagctgaggagaaggctgctatcataagcatatgggaaaaagtggacttggaaaaacttggaggagaaaccctgggaaggtagggtcagagaccaggactggggaggaatggagggaaattgtccttgtgcatggcagaaatttcctctagaacagtggtgttcaaccttcctaataacctttaatatagttactcatgtgatgaccctaaccataaacaattattttagttgctatttcataactgtaattttgatactgctatgtaaatatctgtcttttttgatggtgttaggtgaccccagtgaaagggtctttctactctcaaaggggccatgacatacatagcttgaaaaaccctgttctaggggtttgtgatatactctgacttttaaactgctatgttttaggctcctcattgtatatccatggactcagagattctttgacaagtttggaaacctctcttctgctccggccatcatgggtaatccccagatcagagcccatggcaagaaagtgctggtgtccctaggcttggcagttgagaacatggacaacctcaaggagacctttgctcatctgagtgagctgcactgtgacaagcttcacgtggatcccgagaactttaaggtcactttgagcacgcttatgtgtttaatttaaatttgacatggggaaaagaataaaagttaatgccttgttttgttatgctgggccagatctcaaaacatgcggttatagatcttgtgtcaactaattgctagaaacatttgcaactgcccagaaaagtttttcagacagacatttgctgtctcggtaactcagctgatgtaatgcctctctgggatatatgaatcctgagactggaacactactaacaaagcacaaaggggcagagtcttagagttggttacagaatcctcctcactctgtgttttattttagaaggtagcacatacatgtaagtggaagtagcccttgaaattgacattttgttttagggaagggagaaatacctcattttgtggattctaatgattgacacttcaggaaagatagaagagaaatttttgacagatttttcccaattggtttgataaacttcctaaaaaatgctacaattttaatgaataatatcataagtagtgcattcttccttcattattggagacttgaactccagcaaacatgttgttacactgaaattgtgcatttagtgaagccaggccctgggtgaatgagaaaaggggcaagagacaaaaatagcagactgaagaaatgttaggtgcaagcaggagaggatctaatgagctcagggagggcaggcccttgagcagtgaaattgagccaacctcctcactagagtggataggttgctggggagtcctcaagaaagataacttacaaataccatttttcctataaattcttttctgtatctccttttctcatttttgtgtatccttttgtgtttcctttcacagctcctgggtaacgtgctggtgattgttctttcttcttacttcggcaaagaattcacagctgaggtgcaggctgcctggcagaagctggtggctggggtggccactgctctgtcccacaagtaccactgagccccttccctgacttccagcattctgcatatccccagctctgtcctacacatgaccactctgctggtctctgcaagcaagacttctacttaataaagtccattctcctcagtaatccatgagtcatattttgtcctatctgttccttttgtgtttaaagaaaaaagactgatggacagaaaggaagggagagacacagaagtttctttgaaaactgtgttggcagttaggagaggagagtagatgttatagaatttt

SEQ ID NO: 14179 - protein, 147 aa, Rattus norvegicus
  ref <308>: DATABASE ACCESSION NUMBER: SWISS-Prot / CAA39766
  ref <309>: DATABASE ENTRY DATE: 2003-02-01
MVHFTAEEKAAIISIWEKVDLEKLGGETLGRLLIVYPWTQRFFDKFGNLSSAPAIMGNPQIRAHGKKVLVSLGLAVENMDNLKETFAHLSELHCDKLHVDPENFKLLGNVLVIVLSSYFGKEFTAEVQAAWQKLVAGVATALSHKYH

SEQ ID NO: 14180 - DNA, 3919 bp, Homo sapiens
  misc_feature (1)..(3919): n=a, c, g or t
  ref <308>: DATABASE ACCESSION NUMBER: EMBL / V00508
  ref <309>: DATABASE ENTRY DATE: 1999-02-10
gaattcccctagttttgtctgtgttagccaatggttagaatatatgctcagaaagataccattggttaatagctaaaagaaaatggagtagaaattcagtggcctggaataataacaatttgggcagtcattaagtcaggtgaagacttctggaatcatgggagaaaagcaagggagacattcttacttgccacaagtgtttttttttttttttttttttatcacaaacataagaaaatataataaataacaaagtcaggttatagaagagagaaacgctcttagtaaacttggaatatggaatccccaaaggcacttgacttgggagacaggagccatactgctaagtgaaaaagacgaagaacctctagggcctgaacatacaggaaattgtaggaacagaaattcctagatctggtggggcaaggggagccataggagaaagaaatggtagaaatggatggagacggaggcagaggtgggcagatcatgaggtcaagagatcgagaccatcctggcaaacatggtgaaatcccgtctctactaaaaataaaaaaattagctgggcatggtggcatgcgcctgtagtcccagctgctcgggaggctgaggcaggagaatcgtttgaacccaggaggcgaaggttgcagtgagctgagatagtgccattgcactccagtctggcaacagagtgagactccgtctcaaaaaaaaaaaaaagaaagaaagaaaagaaaaagaaaaaagaaaaaataaatggatgtagaacaagccagaaggaggaactgggctggggcaatgagattatggtgatgtaagggacttttatagaattaacaatgctggaatttgtggaactctgcttctattattcccccaatcattacttctgtcacattgatagttaaataatttctgtgaatttattccttgantcccaaaatattgaggtaaataacaatggtattataaaagggcagattaagtgatatagcataagcaatattcttcaggcacatggatcgaattgaatacactgtaaatcccaacttccagtttcagctctaccaagtaaagagctagcaagtcatcaaaatggggacatacagaaaaaaaaaaggacactagaggaataatataccctgantcctagcctgattgatgtgtcgattcacttttactctgtttggtgacaaattctggctttaaataattttaggattttaggcttctcagctcccttcccagtgagaagtataagcaggacagcaggcaagcaagaagagagcccaaggcaatactcacaaagtagccagtgtcccctgtggtcatagagaaatggaaagagagaggantccccccttggagccactgggtggtaatcctttccgtccgttcctctctagggaatcaccccaaggtactgtactttgggattaaggctttagtcccactgtggactacttgctattctgttcagtttctgaaggaactatgtacggtttttgtctccctagagaaactaaggtacagaagttttgtttacaatgcactccttaagagagctagaactgggtgaagantcctggtttaaccagccttaatttcctttccctgggccccggtttggtcacgtcactgtcaccacctttaaggcaaatgttaaatgcgctttggctgaactttttcctattttgagatttgctcctttatatgaggctttcttggaaaaggagaatgggagagatggatatcattttggaagatgatgaagagggtaaaaaagggtacaaatggaaatttgtgttgcagatagtatgaggagccaacaaaaaagagcctcaggatccagcacacattatcacaaacttagtgtccatccatcactgctgaccctctccggacctgactccacccctgaggacacaggtcagccttgaccaatgacttttaagtaccatggagaacagggggccagaacttcggcagtaaagaataaaaggccagacagagaggcagcagcacatatctgcttccgacacagctgcaatcactagcaagctctcaggcctggcatcatggtgcattttactgctgaggagaaggctgccgtcactagcctgtggagcaagatgaatgtggaagaggctggaggtgaagccttgggcaggtaagcattggttctcaatgcatgggaatgaagggtgaatattaccctagcaagttgattgggaaagtcctcaagattttttgcatctctaattttgtatctgatatggtgtcatttcatagactcctcgttgtttacccctggacccagagattttttgacagctttggaaacctgtcgtctccctctgccatcctgggcaaccccaaggtcaaggcccatggcaagaaggtgctgacttcctttggagatgctattaaaaacatggacaacctcaagcccgcctttgctaagctgagtgagctgcactgtgacaagctgcatgtggatcctgagaacttcaaggtgagttcaggtgctggtgatgtgattttttggctttatattttgacattaattgaagctcataatcttattggaaagaccaacaaagatctcagaaatcatgggtcgagcttgatgttagaacagcagacttctagtgagcataaccaaaacttacatgattcagaactagtgacagtaaaggactactaacagcctgaattggcttaacttttcaggaaatcttgccagaacttgatgtgtttatcccagagaattgtattatagaattgtagacttgtgaaagaagaatgaaatttggcttttggtagatgaaagtccatttcaaggaaatagaaatgccttattttatgtgggtcatgataattgaggtttagaagagatttttgcaaaaaaaataaaagatttgctcaaagaaaaataagacacattttctaaaatatgttaaatttcccatcagtattgtgaccaagtgaaggcttgtttccgaatttgttggggattttaaactcccgctgagaactcttgcagcactcacattctacatttacaaaaattagacaattgcttaaagaaaaacagggagagagggaacccaataatactggtaaaatggggaagggggtgagggtgtaggtaggtagaatgttgaatgtagggctcatagaataaaattgaacctaagctcatctgaattttttgggtgggcacaaaccttggaacagtttgaggtcagggttgtctaggaatgtaggtataaagccgtttttgtttgtttgtttgttttttcatcaagttgttttcggaaacttctactcaacatgcctgtgtgttattttgtcttttgcctaacagctcctgggtaacgtgatggtgattattctggctactcactttggcaaggagttcacccctgaagtgcaggctgcctggcagaagctggtgtctgctgtcgccattgccctggcccataagtaccactgagttctcttccagtttgcaggtgttcctgtgaccctgacaccctccttctgcacatggggactgggcttggccttgagagaaagccttctgtttaataaagtacattttcttcagtaatcaaaaattgcaattttatcttctccatcttttactcttgtgttaaaaggaaaaagtgttcatgggctgagggatggagagaaacataggaagaaccaagagcttccttaagaaatgtatgggggcttgtaaaattaatgtggatgttatgggagaattcccaagattcccaaggaggatgatatgatggagaaaaatctttatcggggtgggaaaatggttaattaagtggcagagactcctaggcagtttttactgcaccggggaaagaaggagctgttgtggtacctgagaaagcagatt

SEQ ID NO: 14181 - protein, 146 aa, Homo sapiens
  ref <308>: DATABASE ACCESSION NUMBER: SWISS-Prot / P02100
  ref <309>: DATABASE ENTRY DATE: 2002-06-15
VHFTAEEKAAVTSLWSKMNVEEAGGEALGRLLVVYPWTQRFFDSFGNLSSPSAILGNPKVKAHGKKVLTSFGDAIKNMDNLKPAFAKLSELHCDKLHVDPENFKLLGNVMVIILATHFGKEFTPEVQAAWQKLVSAVAIALAHKYH

SEQ ID NO: 14182 - DNA, 2299 bp, Rattus norvegicus; identical to SEQ ID NO: 14178
  ref <308>: DATABASE ACCESSION NUMBER: EMBL / X56327
  ref <309>: DATABASE ENTRY DATE: 1999-08-25

SEQ ID NO: 14183 - protein, 147 aa, Rattus norvegicus; identical to SEQ ID NO: 14179
  ref <308>: DATABASE ACCESSION NUMBER: SWISS-Prot / CAA39766
  ref <309>: DATABASE ENTRY DATE: 2003-02-01

SEQ ID NO: 14184 - DNA, 3919 bp, Homo sapiens; identical to SEQ ID NO: 14180
  misc_feature (1)..(3919): n=a, c, g or t
  ref <308>: DATABASE ACCESSION NUMBER: EMBL / V00508
  ref <309>: DATABASE ENTRY DATE: 1999-02-10

SEQ ID NO: 14185 - protein, 146 aa, Homo sapiens; identical to SEQ ID NO: 14181
  ref <308>: DATABASE ACCESSION NUMBER: SWISS-Prot / P02100
  ref <309>: DATABASE ENTRY DATE: 2002-06-15

SEQ ID NO: 14186 - DNA, 1401 bp, Rattus norvegicus
  ref <308>: DATABASE ACCESSION NUMBER: EMBL / X57988
  ref <309>: DATABASE ENTRY DATE: 1991-05-21
tcttccgggtcttccgtcgttccggaagcccgcgaattccggaagcgagggctacccagattcggctaggaaaagcccagcttgccagagaatgtttgagaaaagtttgcgcggcgctggtgtgttccgcagaccctgcagacagcatcagagaagatatggctgccagagaagagagtacacaaagtgccaacagagtgctgaggataagtcagctggatgcactggaactgaataaggccctggagcagctcgtgtggtcccagtttactcagtgttttcatggatttaagccaggactgttagctcgctttgagccagaagtgaaagcatttctgtggcttttcctgtggaggttcaccatctattccaaaaatgccactgtggggcagtcggttttaaatattcagtacaaaaatgattcttctcccaacccagtataccaaccaccaagtaaaaatcagaaactgttgtatgctgtgtgcactattggggggaggtggttagaagaacgatgttacgatttgtttcgaaaccgacatttagcatctttcgggaaagccaaacagtgcatgaattttgtggttggacttttaaaattaggtgagttgatgaacttcttgatttttctacaaaaaggaaagtttgcaactttgacagaacgcctccttggcattcattctgtattttgcaagccccagagcatgcgtgaagttggcttcgagtacatgaatagggaacttctctggcatggctttgccgaatttctggttttcctcttaccgctcatcaatatccagaagttgaaagccaagttgtcttcctggtgcatcccccttaccagcactgctggtagtgacagtacactaggcagcagtggaaaagagtgtgctctatgtggagagtggcccacaatgcctcatactattggatgtgagcatgtattttgttactactgtgttaagagtagcttcctatttgacatgtactttacgtgccctaagtgtggcacagaagtgcacagtgtgcagccactgaaatcaggaattgaaatgtcagaagtgaatgctctttagaaaccaagttgtttcctctgaggaaagtgtattgtatccaattccttggaattcgtcatcttcagtgtcatctgtaggtggcttttagcaggagtgtgctgtgcggccactctcttcctttccaagcacaactcagttctaatcactggaaaccaagtgattctagagaatcttataaatcctcatgttattttttgatccctaatacaatttttaatgtcaagaataatggaaaattttgtcagatgaatactaagaatgactaagaatgctccttcatagaaaaaggtcagactctaaaaataaaacatttttgaggctctgg

SEQ ID NO: 14187 - protein, 305 aa, Rattus norvegicus
  ref <308>: DATABASE ACCESSION NUMBER: SWISS-Prot / CAA41054
  ref <309>: DATABASE ENTRY DATE: 2001-10-16
MAAREESTQSANRVLRISQLDALELNKALEQLVWSQFTQCFHGFKPGLLARFEPEVKAFLWLFLWRFTIYSKNATVGQSVLNIQYKNDSSPNPVYQPPSKNQKLLYAVCTIGGRWLEERCYDLFRNRHLASFGKAKQCMNFVVGLLKLGELMNFLIFLQKGKFATLTERLLGIHSVFCKPQSMREVGFEYMNRELLWHGFAEFLVFLLPLINIQKLKAKLSSWCIPLTSTAGSDSTLGSSGKECALCGEWPTMPHTIGCEHVFCYYCVKSSFLFDMYFTCPKCGTEVHSVQPLKSGIEMSEVNAL

SEQ ID NO: 14188 - DNA, 1630 bp, Homo sapiens
  ref <308>: DATABASE ACCESSION NUMBER: Refseq / NM_000318
  ref <309>: DATABASE ENTRY DATE: 2002-11-05
ccatccagtgccttccgcagcgccgctaaagcgcagttctcgttggtgtaactttttcttttttttttcagccacttccggctcctgcgtcgctccggaagcctgcgagttccggaagccttggtaatccagattcggctaggaaaagacaagctttccagagaatgtttcagagaaagttacgtggagcgtgggcgtttcgcagactcctaagtggtctggaacctaacctgcagtgtctctgagcttctggcaagtatgaggcaaggatttcacagaagaacttggagcaaaaattcccactgtcatagctataggctgtccagtcttgagggagctgcaggaacaggaaaaagagaccttcagagaagacatggcttccagaaaagagaatgcgaagagtgcaaacagagtgctaagaataagccagttggatgcacttgaactaaacaaggccctggagcagctagtttggtcccagtttactcagtgctttcatggatttaaacctgggctgttagctcgctttgagccagaggtgaaagcgtgcttatgggttttcttgtggagattcaccatctactccaaaaatgccacagtgggacagtcagttttgaatattaagtacaaaaatgatttttcccctaacctgagatatcagccacccagtaaaaatcaaaaaatctggtatgctgtttgtacaattggtggcaggtggttagaagaacgatgctatgatttgtttcgaaaccatcatttagcatcatttgggaaagtcaagcagtgtgtgaattttgtgattggacttttgaaattaggtgggctgattaattttttgattttccttcagaggggaaagtttgcaactttgacagaacgtctcctaggtattcattctgtattttgcaagcctcaaaacatacgtgaagttggctttgaatacatgaatagggaacttctctggcatggttttgctgaatttctgatttttctcttaccacttatcaatgtccagaagttgaaagccaagctgtcttcatggtgtattcctcttactggtgcacctaatagtgacaatacattagccaccagtggcaaagaatgcgctctatgtggagagtggcccaccatgcctcacaccataggatgtgagcatattttctgttatttctgtgctaagagtagtttcttatttgacgtgtactttacttgtcctaagtgtggcacagaagtacacagtctgcagccactgaaatcaggaatcgagatgtcagaagtaaatgctctttagaaactaaaattgcttcctttgaggaaaaaaatgcaccgtgtttaaattcttaatattagtcatcctaagtataccatttatgtatcctttataaggaatgtgctcctagccactgtcttctcctttccaggcatgactgaaatctaatcactggaaaccatgtgattctaaatatattatgtaaatgttaatgtattatgttttttaaatcattgcattcaatttttaatgtcaagaataatggacagcttttgtcaggtgactactaacaatgctccttcattttactacttcttaaaacaaggttggattctaaagataaagattttggagactctg

SEQ ID NO: 14189 - protein, 305 aa, Homo sapiens
  ref <308>: DATABASE ACCESSION NUMBER: Refseq / NP_000309
  ref <309>: DATABASE ENTRY DATE: 2002-11-05
MASRKENAKSANRVLRISQLDALELNKALEQLVWSQFTQCFHGFKPGLLARFEPEVKACLWVFLWRFTIYSKNATVGQSVLNIKYKNDFSPNLRYQPPSKNQKIWYAVCTIGGRWLEERCYDLFRNHHLASFGKVKQCVNFVIGLLKLGGLINFLIFLQRGKFATLTERLLGIHSVFCKPQNIREVGFEYMNRELLWHGFAEFLIFLLPLINVQKLKAKLSSWCIPLTGAPNSDNTLATSGKECALCGEWPTMPHTIGCEHIFCYFCAKSSFLFDVYFTCPKCGTEVHSLQPLKSGIEMSEVNAL

SEQ ID NO: 14190 - DNA, 410 bp, Rattus norvegicus; identical to SEQ ID NO: 9800
  ref <308>: DATABASE ACCESSION NUMBER: EMBL / X62325
  ref <309>: DATABASE ENTRY DATE: 1999-07-30

SEQ ID NO: 14191 - DNA, 410 bp, Rattus norvegicus; identical to SEQ ID NO: 9800
  ref <308>: DATABASE ACCESSION NUMBER: EMBL / X62325
  ref <309>: DATABASE ENTRY DATE: 1999-07-30

SEQ ID NO: 14192 - DNA, 410 bp, Rattus norvegicus; identical to SEQ ID NO: 9800
  ref <308>: DATABASE ACCESSION NUMBER: EMBL / X62325
  ref <309>: DATABASE ENTRY DATE: 1999-07-30

SEQ ID NO: 14193 - DNA, 410 bp, Rattus norvegicus; identical to SEQ ID NO: 9800
  ref <308>: DATABASE ACCESSION NUMBER: EMBL / X62325
  ref <309>: DATABASE ENTRY DATE: 1999-07-30

SEQ ID NO: 14194 - DNA, 893 bp, Rattus norvegicus; identical to SEQ ID NO: 9802
  ref <308>: DATABASE ACCESSION NUMBER: EMBL / X62660
  ref <309>: DATABASE ENTRY DATE: 1999-07-01

SEQ ID NO: 14195 - protein, 222 aa, Rattus norvegicus; identical to SEQ ID NO: 9803
  ref <308>: DATABASE ACCESSION NUMBER: SWISS-Prot / CAB46530
  ref <309>: DATABASE ENTRY DATE: 1995-11-01

SEQ ID NO: 14196 - DNA, 918 bp, Homo sapiens; identical to SEQ ID NO: 2695
  ref <308>: DATABASE ACCESSION NUMBER: Refseq / NM_000847
  ref <309>: DATABASE ENTRY DATE: 2002-11-05

SEQ ID NO: 14197 - protein, 222 aa, Homo sapiens
  ref <308>: DATABASE ACCESSION NUMBER: Refseq / NP_000838
  ref <309>: DATABASE ENTRY DATE: 2002-11-05
MAGKPKLHYFNGRGRMEPIRWLLAAAGVEFEEKFIGSAEDLGKLRNDGSLMFQQVPMVEIDGIKLVQTRAILNYIASKYNLYGKDIKERALIDMYTEGMADLNEMILLLPLCRPEEKDAKIALIKEKTKSRYFPAFEKVLQSHGQDYLVGNKLSRADISLVELLYYVEELDSSLISNFPLLKALKTRISNLPTVKKFLQPGSPRKPPADAKALEEARKIFRF

SEQ ID NO: 14198 - DNA, 466 bp, Rattus norvegicus; identical to SEQ ID NO: 9824
  ref <308>: DATABASE ACCESSION NUMBER: EMBL / X62950
  ref <309>: DATABASE ENTRY DATE: 1997-05-12

SEQ ID NO: 14199 - protein, 415 aa, Rattus norvegicus; identical to SEQ ID NO: 9825
  ref <308>: DATABASE ACCESSION NUMBER: SWISS-Prot / AAA40872
  ref <309>: DATABASE ENTRY DATE: 2002-06-15

SEQ ID NO: 14200 - DNA, 1066 bp, Rattus norvegicus
  ref <308>: DATABASE ACCESSION NUMBER: EMBL / X63410
  ref <309>: DATABASE ENTRY DATE: 1995-01-24
ctggaatcctaacaggacctacacagagctatttataatgccagactatacttggtttgaaggaataccttttcctgcctttgggattccaaaagaaactttgcaaaatgtttgtaataagtttgtggtgaaagaagaagatttgatcttattgacttatcccaagtcaggaacgaactggctgattgaaattgtctgcttgattcagaccaagggagatcccaagtggatccaatctgtgaccatctgggatcgctcaccctggatagagactgatttaggatatgatatgttaatcaaaaagaaaggaccacgactcataacctcccatcttcccatgcatcttttctccaagtctctcttcagttccaaggccaaggtgatctatctcatcagaaatcccagagatgttcttgtttctggttattatttctggggtaagacaactcttgcgaagaagccagactcactgggaacgtatgttgaatggttcctcaaaggaaatgttccgtatggatcatggtttgagcacatccgtgcctggctgtctatgcgagaattagacaacttcttgttactgtactatgaagacatgaaaaaggatacaatgggaaccataaagaagatatgtgacttcctggggaaaaaattagagccagatgagctggatttggtcctcaagtacagttccttccaagtcatgaaagaaaacaacatgtccaattataatctcatggagaaggaactgattcttcctggttttactttcatgagaaacggcactactggggactggaagaatcacttcactgtagcccaagctgaagcctttgataaagtgtttcaggagaaaatggccggtttccctccagggatgttcccatgggattaaaatttcaaaagttttaaatattttatgaacattgatttttatgtttctgttgttctatgtctgaataagtgaatgtggtcattgaataaattctattctggcattgtgaaaaaaaaaaaaaaaaaaaaaaaaaaaaaaaaaaaaaaaaaaaaaaaaaaaaaaaaaaaaaaaaaa

SEQ ID NO: 14201 - protein, 283 aa, Rattus norvegicus
  ref <308>: DATABASE ACCESSION NUMBER: SWISS-Prot / CAA45007
  ref <309>: DATABASE ENTRY DATE: 2001-10-16
PDYTWFEGIPFPAFGIPKETLQNVCNKFVVKEEDLILLTYPKSGTNWLIEIVCLIQTKGDPKWIQSVTIWDRSPWIETDLGYDMLIKKKGPRLITSHLPMHLFSKSLFSSKAKVIYLIRNPRDVLVSGYYFWGKTTLAKKPDSLGTYVEWFLKGYVPYGSWFEHIRAWLSMRELDNFLLLYYEDMKKDTMGTIKKICDFLGKKLEPDELDLVLKYSSFQVMKENNMSNYNLMEKELILPGFTFMRNGTTGDWKNHFTVAQAEAFDKVFQEKMAGFPPGMFPWD

SEQ ID NO: 14202 - DNA, 1051 bp, Homo sapiens
  ref <308>: DATABASE ACCESSION NUMBER: EMBL / S43859
  ref <309>: DATABASE ENTRY DATE: 2000-07-07
ctgccacagcctccagcggtggctacagttgaaaccctcacaccacgcaggaagaggtcatcatcatgtcggacgatttcttatggtttgaaggcatagctttccctactatgggtttcagatccgaaaccttaagaaaagtacgtgatgagttcgtgataagggatgaagatgtaataatattgacttaccccaaatcaggaacaaactggttggctgagattctctgcctgatgcactccaagggggatgccaagtggatccaatctgtgcccatctgggagcgatcaccctgggtagagagtgagattgggtatacagcactcagtgaaacggagagtccacgtttattctcctcccacctccccatccagttattccccaagtctttcttcagttccaaggccaaggtgatttatctcatgagaaatcccagagatgttttggtgtctggttattttttctggaaaaacatgaagtttattaagaaaccaaagtcatgggaagaatattttgaatggttttgtcaaggaactgtcgtatatgggtcatggtttgaccacattcatggctggatgcccatgagagaggagaaaaacttcctgttactgagttatgaggagctgaaacaggacacaggaagaaccatagagaagatctgtcaattcctgggaaagacgttagaacccgaagaactgaacttaattctcaagaacagctcctttcagagcatgaaagaaaacaagatgtccaattattccctcctgagtgttgattatgtagtggacaaagcacaacttctgagaaaaggtgtatctggggactggaaaaatcacttcacagtggcccaagctgaagactttgataaattgttccaagagaagatggcagatcttcctcgagagctgttcccatgggaataacgtccaaaacactctggatcttatatggagaatgacattgattctcctgtccttgtacatgtacctgactggggtcattgtgtaagacttattattttatcctgaaaccttaaatatcaaacctctgc

SEQ ID NO: 14203 - protein, 284 aa, Homo sapiens; identical to SEQ ID NO: 12493
  ref <308>: DATABASE ACCESSION NUMBER: SWISS-Prot / AAB23169
  ref <309>: DATABASE ENTRY DATE: 2002-06-15

SEQ ID NO: 14204 - DNA, 2232 bp, Rattus norvegicus
  ref <308>: DATABASE ACCESSION NUMBER: EMBL / X63722
  ref <309>: DATABASE ENTRY DATE: 1993-11-16
tttaaaatgcctgggaagatggtcgcgatcttcggagcctcaacggtactttggatactgtttgcagtctctcaagcttttaaaatcgagatctcccctgaatacaaaacgctcgctcagattggagactccatgctcctgacttgcagcaccacaggctgtgagtcgccatcattctcttggagaacccagatagacagtccactaaatgggaaggtgaagacagagggggccaagtccgttctgaccatggaccctgtcagctttgagaatgaacactcttacctgtgcacagcaacatgtaactctgggaaactggaaagaggaatccaagtggacatctactcattccctaaggatccagagattcatttgagtggccccctggaggttgggaagccggtcatggtcaagtgtttggctcctgatgtttacccaattgacagactggagatagaactgttcaagggtgaccgtctcatgaagaaacaggattttgtaaacgagatggcaaagaagtctctggaaaccaagagtttggaagtcatctttactcctgtcattgaggatattgaaaaggctcttgtttgccgagctaaattatacattgaccaaactgattctattcccaaagaaagggagactgtcagagaactacaagtctacacctcccccaagaatacagagatctctgtacatccctccacaaggctacatgagggtgctgctgtgacgatgacatgtgccagcgagggtctaccagctcctgagattttctggagcaagaaattagataatggagttctacagctcctctcgggaaatgccaccctcaccttaattgctatgaggatggaagattctggaatctatgtgtgtgaaggagtgaatctggttgggagagacaaaacagaagtggaattaattgttcaagagaaaccatttactgttgacatctcccctggatctcaggtggctgcacaggttggggattccgttgttctgacatgtgctgctgttggctgtgactctccctccttttcttggagaacccagacagacagtcccctcaatggggaggtgagggatgaaggggctacatccacactgacgctgagccctgtgggtgttgaggatgagcactcttacctgtgcactgtgacctgtcagcgaaggaaactggagaagacaatccaagtggaggtctactcattccctgaagacccagaaattgaaataagtggaccacttgtacacgggagacctgtcactgtcaactgcacggtccctaatgtgtacccctttgaccatctggagattgaactactgaagggggagacaacactgttgaataaatttttaagggaggaaattggcacaaagtctctagagaccaaaagtttggaaatgaccttcatccccaccgctgaagacaccgggaaagctcttgtttgcctcgctaagttacacagcagtcaaatggagtctgaacccaaacaaaggcagagtacacagactctttatgtcaacgttgctccgaaagaacccaccatctgggttagcccctctcctgtcccagaggagggcagtcctgtgaacctgacctgctcaagtgatggttttccaactcccaaaatcctgtggagcagacagctaaagaacggggaactgcagcctctttctcaaaatacaacactctccttcatggctacaaaaatggaagattccggcatttatgtatgtgaagggattaatgaggctggaattagcaaaaaatcagttgaactgattatccaaggctcttcgaaggacatacagcttacagtcttcccatctaagagcgtcaaagagggagacactgtcattatctcctgtacttgtggaagtgtgcccgaaatatggataattctgaaaaagaaagccaagacaggagacatggtgctaaagtctgttaatggctcgtacaccatccgcaaggcacagctgcaggatgccggagtatacgagtgtgaatcgaaaaccgaagtcggctcgcagttgcgaagtttaacacttgatgtgaaaggaaaagaaaataacaaggactatttttcccctgaactccttgcactctactttgcatcctccttggtaatacccgccattgggatgatcatttactttgcaagaaaagccaacatgaaaggatcatacagtctggtggaagcacagaaatcaaaagggtagctaatg

SEQ ID NO: 14205 - protein, 739 aa, Rattus norvegicus
  ref <308>: DATABASE ACCESSION NUMBER: PIR / JS0675
  ref <309>: DATABASE ENTRY DATE: 1999-11-05
MPVKMVAIFGASTVLWILFAVSQAFKIEISPEYKTLAQIGDSMLLTCSTTGCESPSFSWRTQIDSPLNGKVKTEGAKSVLTMDPVSFENEHSYLCTATCNSGKLERGIQVDIYSFPKDPEIQFSGPLEVGKPVMVKCLAPDVYPIDRLEIELFKGDRLMKKQDFVDEMAKKSLETKSLEVIFTPVIEDIEKALVCRAKLYIDQTDSIPKERETVRELQVYTSPKNTEISVHPSTRLHEGAAVTMTCASEGLPAPEIFWSKKLDNGVLQLLSGNATLTLIAMRMEDSGIYVCEGVNLVGRDKTEVELIVQEKPFTVDISPGSQVAAQVGDSVVLTCAAVGCDSPSFSWRTQTDSPLNGEVRDEGATSTLTLSPVGVEDEHSYLCTVTCQRRKLEKTIQVEVYSFPEDPEIEISGPLVHGRPVTVNCTVPNVYPFDHLEIELLKGETTLLNKFLREEIGTKSLETKSLEMTFIPTAEDTGKALVCLAKLHSSQMESEPKQRQSTQTLYVNVAPKEPTIWVSPSPVPEEGSPVNLTCSSDGFPTPKILWSRQLKNGELQPLSQNTTLSFMATKMEDSGIYVCEGINEAGISKKSVELIIQGSSKDIQLTVFPSKSVKEGDTVIISCTCGSVPEIWIILKKKAKTGDMVLKSVNGSYTIRKAQLQDAGVYECESKTEVGSQLRSLTLDVKGKENNKDYFSPELLALYFASSLVIPAIGMIIYFARKANMKGSYSLVEAQKSKV

SEQ ID NO: 14206 - DNA, 2220 bp, Homo sapiens
  ref <308>: DATABASE ACCESSION NUMBER: EMBL / X53051
  ref <309>: DATABASE ENTRY DATE: 1995-03-31
atgcctgggaagatggtcgtgatccttggagcctcaaatatactttggataatgtttgcagcttctcaagcttttaaaatcgagaccaccccagaatctagatatcttgctcagattggtgactccgtctcattgacttgcagcaccacaggctgtgagtccccatttttctcttggagaacccagatagatagtccactgaatgggaaggtgacgaatgaggggaccacatctacgctgacaatgaatcctgttagttttgggaacgaacactcttacctgtgcacagcaacttgtgaatctaggaaattggaaaaaggaatccaggtggagatctactcttttcctaaggatccagagattcatttgagtggccctctggaggctgggaagccgatcacagtcaagtgttcagttgctgatgtatacccatttgacaggctggagatagacttactgaaaggagatcatctcatgaagagtcaggaatttctggaggatgcagacaggaagtccctggaaaccaagagtttggaagtaacctttactcctgtcattgaggatattggaaaagttcttgtttgccgagctaaattacacattgatgaaatggattctgtgcccacagtaaggcaggctgtaaaagaattgcaagtctacatatcacccaagaatacagttatttctgtgaatccatccacaaagctgcaagaaggtggctctgtgaccatgacctgttccagcgagggtctaccagctccagagattttctggagtaagaaattagataatgggaatctacagcacctttctggaaatgcaactctcaccttaattgctatgaggatggaagattctggaatttatgtgtgtgaaggagttaatttgattgggaaaaacagaaaagaggtggaattaattgttcaagagaaaccatttactgttgagatctcccctggaccccggattgctgctcagattggagactcagtcatgttgacatgtagtgtcatgggctgtgaatccccatctttctcctggagaacccagatagacagccctctgagcgggaaggtgaggagtgaggggaccaattccacgctgaccctgagccctgtgagttttgagaacgaacactcttatctgtgcacagtgacttgtggacataagaaactggaaaagggaatccaggtggagctctactcattccctagagatccagaaatcgagatgagtggtggcctcgtgaatgggagctctgtcactgtaagctgcaaggttcctagcgtgtacccccttgaccggctggagattgaattacttaagggggagactattctggagaatatagagtttttggaggatacggatatgaaatctctagagaacaaaagtttggaaatgaccttcatccctaccattgaagatactggaaaagctcttgtttgtcaggctaagttacatattgatgacatggaattcgaacccaaacaaaggcagagtacgcaaacactttatgtcaatgttgcccccagagatacaaccgtcttggtcagcccttcctccatcctggaggaaggcagttctgtgaatatgacatgcttgagccagggctttcctgctccgaaaatcctgtggagcaggcagctccctaacggggagctacagcctctttctgagaatgcaactctcaccttaatttctacaaaaatggaagattctggggtttatttatgtgaaggaattaaccaggctggaagaagcagaaaggaagtggaattaattatccaagttactccaaaagacataaaacttacagcttttccttctgagagtgtcaaagaaggagacactgtcatcatctcttgtacatgtggaaatgttccagaaacatggataatcctgaagaaaaaagcggagacaggagacacagtactaaaatctatagatggcgcctataccatccgaaaggcccagttgaaggatgcgggagtatatgaatgtgaatctaaaaacaaagttggctcacaattaagaagtttaacacttgatgttcaaggaagagaaaacaacaaagactatttttctcctgagcttctcgtgctctattttgcatcctccttaataatacctgccattggaatgataatttactttgcaagaaaagccaacatgaaggggtcatatagtcttgtagaagcacagaaatcaaaagtgtag

SEQ ID NO: 14207 - protein, 739 aa, Homo sapiens
  ref <308>: DATABASE ACCESSION NUMBER: SWISS-Prot / P19320
  ref <309>: DATABASE ENTRY DATE: 2002-06-15
MPGKMVVILGASNILWIMFAASQAFKIETTPESRYLAQIGDSVSLTCSTTGCESPFFSWRTQIDSPLNGKVTNEGTTSTLTMNPVSFGNEHSYLCTATCESRKLEKGIQVEIYSFPKDPEIHLSGPLEAGKPITVKCSVADVYPFDRLEIDLLKGDHLMKSQEFLEDADRKSLETKSLEVTFTPVIEDIGKVLVCRAKLHIDEMDSVPTVRQAVKELQVYISPKNTVISVNPSTKLQEGGSVTMTCSSEGLPAPEIFWSKKLDNGNLQHLSGNATLTLIAMRMEDSGIYVCEGVNLIGKNRKEVELIVQEKPFTVEISPGPRIAAQIGDSVMLTCSVMGCESPSFSWRTQIDSPLSGKVRSEGTNSTLTLSPVSFENEHSYLCTVTCGHKKLEKGIQVELYSFPRDPEIEMSGGLVNGSSVTVSCKVPSVYPLDRLEIELLKGETILENIEFLEDTDMKSLENKSLEMTFIPTIEDTGKALVCQAKLHIDDMEFEPKQRQSTQTLYVNVAPRDTTVLVSPSSILEEGSSVNMTCLSQGFPAPKILWSRQLPNGELQPLSENATLTLISTKMEDSGVYLCEGINQAGRSRKEVELIIQVTPKDIKLTAFPSESVKEGDTVIISCTCGNVPETWIILKKKAETGDTVLKSIDGAYTIRKAQLKDAGVYECESKNKVGSQLRSLTLDVQGRENNKDYFSPELLVLYFASSLIIPAIGMIIYFARKANMKGSYSLVEAQKSKV

SEQ ID NO: 14208 - DNA, 1992 bp, Rattus norvegicus
  ref <308>: DATABASE ACCESSION NUMBER: EMBL / X65083
  ref <309>: DATABASE ENTRY DATE: 1993-09-21
cttcttgtctttgtcagcttggcgctgcagcccgggccatcatggcgctgcgtgtggccgcgttcgaccttgacggagtgctggccctcccctctatagccggggttctgcgccacaccgaggaggccctggcgctgcccagagacttcctacttggcgctttccagatgaaattcccagagggacccactgagcaactcatgaaaggaaagatcacattttcccagtgggtaccactcatggatgaaagctgcaggaagtcctccaaagcctgtggagccagtctacctgagaatttctccataagtgaaatattcagccaagccatggcagcaagaagcatcaaccgccccatgcttcaggcagctgctgctctcaaaaagaaaggattcacaacgtgcattgtcaccaacaactggctggacgacagtgacaagagagacatcctggcccagatgatgtgtgagctgagccaacactttgacttcctcatagagtcctgtcaggtcgggatgatcaagcctgagcctcagatctacaagtttgtactggacaccctgaaggcaaaacccaatgaggttgttttcctagatgactttggaagtaatctgaagccagcccgtgacatggggatggttaccatcctggtccgcgacacagcctcggctttgagagaactggagaaagtcacagggacacagtttcctgaggcacctctgccagtcccgtgcagtccaaatgatgtcagccatgggtatgtgacagtgaagccagggatccgtctgcactttgtggagatgggctctggccctgctatatgcctctgtcatgggtttcctgagagctggttttcttggaggtaccagatccctgctctggcccaggcgggctttcgtgttctagctatagacatgaaaggctatggagactcatcttctcctccagaaatagaagaatatgctatggaattgctgtgtgaggagatggtgacattcctgaataaactgggaatccctcaagcagtgttcattggccatgactgggctggtgtgctggtgtggaatatggctctcttccaccctgagagagtgagggctgtggccagtttgaacactccattaatgccaccaaatcctgaggtgtcccccatggaagttatcagatcgatcccagttttcaactatcagctgtactttcaagagccaggagtggctgaggctgaactggaaaagaacatgagtcggactttcaaaagcttcttccgaaccagtgatgatatgggtctcctcactgtgaataaagccactgaaatggggggaatccttgtgggaactccagaagatcccaaggtcagcaaaattactactgaggaggaaatagagtattacatacagcagttcaagaagtctggcttcagaggccctctaaactggtatcgaaacacagaaagaaactggaagtggagctgtaaggcgttgggaaggaagatcttggtccctgccctgatggtcacagctgagaaggacattgtactccgtcctgaaatgtccaagaacatggaaaactggatccctttcctgaaaaggggacacatcgaagactgtggtcactggacacagatagagaaaccggcagaggtgaaccagattctcatcaagtggctgaagactgaaatccagaacccatcggtgacctccaagatttagccagtggcgtgtcctctgctggggacacattttcatttctggacgtggccttatccacagccagcagcatcgttcttttgccagcagtgattttctttaaatgaaaatgatcagatgtgatgtaattttagatcaggaagaaagtggtgtgtctgattcttttgaggatgactgtatcaccaaaggagagatcacaccccaatagggaggcatggggcagcccagtttgtacctttgtagccaaacccaagcctgctctttctgaagcagctgatcagagagtagg

SEQ ID NO: 14209 - protein, 554 aa, Rattus norvegicus; identical to SEQ ID NO: 13405
  ref <308>: DATABASE ACCESSION NUMBER: SWISS-Prot / P80299
  ref <309>: DATABASE ENTRY DATE: 1996-10-01

SEQ ID NO: 14210 - DNA, 2100 bp, Homo sapiens
  ref <308>: DATABASE ACCESSION NUMBER: EMBL / L05779
  ref <309>: DATABASE ENTRY DATE: 1999-06-30
ggcacgagctctctctctctctctctctctctctcgccgccatgacgctgcgcggcgccgtcttcgaccttgacggggtgctggcgctgccagcggtgttcggcgtcctcggccgcacggaggaggccctggcgctgcccagaggacttctgaatgatgctttccagaaagggggaccagagggtgccactacccggcttatgaaaggagagatcacactttcccagtggataccactcatggaagaaaactgcaggaagtgctccgagaccgctaaagtctgcctccccaagaatttctccataaaagaaatctttgacaaggcgatttcagccagaaagatcaaccgccccatgctccaggcagctctcatgctcaggaagaaaggattcactactgccatcctcaccaacacctggctggacgaccgtgctgagagagatggcctggcccagctgatgtgtgagctgaagatgcactttgacttcctgatagagtcgtgtcaggtgggaatggtcaaacctgaacctcagatctacaagtttctgctggacaccctgaaggccagccccagtgaggtcgtttttttggatgacatcggggctaatctgaagccagcccgtgacttgggaatggtcaccatcctggtccaggacactgacacggccctgaaagaactggagaaagtgaccggaatccagcttctcaataccccggcccctctgccgacctcttgcaatccaagtgacatgagccatgggtacgtgacagtaaagcccagggtccgtctgcattttgtggagctgggctggcctgctgtgtgcctctgccatggatttcccgagagttggtattcttggaggtaccagatccctgctctggcccaggcaggttaccgggtcctagctatggacatgaaaggctatggagagtcatctgctcctcccgaaatagaagaatattgcatggaagtgttatgtaaggagatggtaaccttcctggataaactgggcctctctcaagcagtgttcattggccatgactggggtggcatgctggtgtggtacatggctctcttctaccccgagagagtgagggcggtggccagtttgaatactcccttcataccagcaaatcccaacatgtcccctttggagagtatcaaagccaacccagtatttgattaccagctctacttccaagaaccaggagtggctgaggctgaactggaacagaacctgagtcggactttcaaaagcctcttcagagcaagcgatgagagtgttttatccatgcataaagtctgtgaagcgggaggactttttgtaaatagcccagaagagcccagcctcagcaggatggtcactgaggaggaaatccagttctatgtgcagcagttcaagaagtctggtttcagaggtcctctaaactggtaccgaaacatggaaaggaactggaagtgggcttgcaaaagcttgggacggaagatcctgattccggccctgatggtcacggcggagaaggacttcgtgctcgttcctcagatgtcccagcacatggaggactggattccccacctgaaaaggggacacattgaggactgtgggcactggacacagatggacaagccaaccgaggtgaatcagatcctcattaagtggctggattctgatgcccggaacccaccggtggtctcaaagatgtagaacgcagcgtagtgcccacgctcagcaggtgtgccatccttccacctgctggggcaccattcttagtatacagaggtggccttacacacatcttgcatggatggcagcattgttctgaaggggtttgcagaaaaaaaagattttctttacataaagtgaatcaaatttgacattattttagatcccagagaaatcaggtgtgattagttctccaggcatgaatgcatcgtccctttatctgtaagaacccttagtgtcctgtagggggacagaatggggtggccaggtggtgatttctctttgaccaatgcatagtttggcagaaaaatcagccgttcatttagaagaatcttagcagagattgggatgccttactcaataaagctaagatgac

SEQ ID NO: 14211 - protein, 554 aa, Homo sapiens
  ref <308>: DATABASE ACCESSION NUMBER: SWISS-Prot / P34913
  ref <309>: DATABASE ENTRY DATE: 2001-10-16
MTLRGAVFDLDGVLALPAVFGVLGRTEEALALPRGLLNDAFQKGGPEGATTRLMKGEITLSQWIPLMEENCRKCSETAKVCLPKNFSIKEIFDKAISARKINRPMLQAALMLRKKGFTTAILTNTWLDDRAERDGLAQLMCELKMHFDFLIESCQVGMVKPEPQIYKFLLDTLKASPSEVVFLDDIGANLKPARDLGMVTILVQDTDTALKELEKVTGIQLLNTPAPLPTSCNPSDMSHGYVTVKPRVRLHFVELGWPAVCLCHGFPESWYSWRYQIPALAQAGYRVLAMDMKGYGESSAPPEIEEYCMEVLCKEMVTFLDKLGLSQAVFIGHDWGGMLVWYMALFYPERVRAVASLNTPFIPANPNMSPLESIKANPVFDYQLYFQEPGVAEAELEQNLSRTFKSLFRASDESVLSMHKVCEAGGLFVNSPEEPSLSRMVTEEEIQFYVQQFKKSGFRGPLNWYRNMERNWKWACKSLGRKILIPALMVTAEKDFVLVPQMSQHMEDWIPHLKRGHIEDCGHWTQMDKPTEVNQILIKWLDSDARNPPVVSKM

SEQ ID NO: 14212 - DNA, 1992 bp, Rattus norvegicus; identical to SEQ ID NO: 14208
  ref <308>: DATABASE ACCESSION NUMBER: EMBL / X65083
  ref <309>: DATABASE ENTRY DATE: 1993-09-21

SEQ ID NO: 14213 - protein, 554 aa, Rattus norvegicus; identical to SEQ ID NO: 13405
  ref <308>: DATABASE ACCESSION NUMBER: SWISS-Prot / P80299
  ref <309>: DATABASE ENTRY DATE: 1996-10-01

SEQ ID NO: 14214 - DNA, 2100 bp, Homo sapiens; identical to SEQ ID NO: 14210
  ref <308>: DATABASE ACCESSION NUMBER: EMBL / L05779
  ref <309>: DATABASE ENTRY DATE: 1999-06-30

SEQ ID NO: 14215 - protein, 554 aa, Homo sapiens; identical to SEQ ID NO: 14211
  ref <308>: DATABASE ACCESSION NUMBER: SWISS-Prot / P34913
  ref <309>: DATABASE ENTRY DATE: 2001-10-16

SEQ ID NO: 14216 - DNA, 3233 bp, Rattus norvegicus; identical to SEQ ID NO: 9894
  ref <308>: DATABASE ACCESSION NUMBER: EMBL / X66022
  ref <309>: DATABASE ENTRY DATE: 1997-02-17

SEQ ID NO: 14217 - DNA, 1421 bp, Homo sapiens; identical to SEQ ID NO: 9896
  ref <308>: DATABASE ACCESSION NUMBER: EMBL / U43843
  ref <309>: DATABASE ENTRY DATE: 1999-07-01

SEQ ID NO: 14218 - protein, 353 aa, Homo sapiens; identical to SEQ ID NO: 9897
  ref <308>: DATABASE ACCESSION NUMBER: SWISS-Prot / Q92782
  ref <309>: DATABASE ENTRY DATE: 2002-06-15

SEQ ID NO: 14219 - DNA, 6244 bp, Rattus norvegicus
  ref <308>: DATABASE ACCESSION NUMBER: EMBL / X66840
  ref <309>: DATABASE ENTRY DATE: 1992-07-31
tggaagctggtgcggcacctggaccgcatcgactccgtgctgctcacacacattggggctgacaatctgccgggcatcaacggcctcctgcagcgcaaggtggcagagctagaggaggagcagtcccagggctccagcagctacagcgactgggtgaagaacctcatctcccctgagcttggagttgtgttcttcaacgtgcctgataagctccggctgcccgacgcctcccgcaaggccaagcgcagcattgaagaggcctgtctcactcttcagcacttaaaccgcctaggcatccaagccgagcctctgtatcgtgtagtcagcaacaccatcgagccactgaccctcttccacaaaatgggtgtgggtaggctggacatgtatgtcctcaaccccgtcaaggacagtaaggagatgcagttcctcatgcagaagtgggcaggcaatagtaaagccaagacaggcattgtactggccaatgggaaggaggcagagatctctgtcccctacctgacctccatcactgctctggtggtatggctcccagccaaccctactgagaagattgtgcgtgttcttttcccgggaaatgctccccagaacaagatcttggagggcttggaaaagcttcggcacctggactttctgcgctaccctgtggcaacgcagaaggacctggctgctggggccgtgcccgccaacttgaaacccagcaaaatcaaacatcgggctgacagcaaggagagcctcaaagctgctcccaagacagcagtgagcaagctggccaaacgggaggaagtgttggaagagggggccaaggaggcccgctcagagctggccaaggagttagccaagacagaaaagaaagcaaagaaccgtctgagaagcccccagaaaaaccctccaagtccgaaagggttgaggggcgagtccagcgaagcgctgaaggccgagaaacggaggctgatcaaggacaaggccggcaagaagcacctgaaggaaaagatttcaaagctagaggagaagaaggacaaggagaaaaaggagatcaagaaggaaaggaaggagctcaagaaggaggaagggagaaaggaagagaaaaaggatgccaaaaaggacgaaaagaggaaagataccaaaccagaggtcaagaaactctccaagccagacctgaagccttttacccctgaggtccgtaagaccctctacaaagccaaggcccctggcagggtcaaggtggacaaaggccgagccgcccgtggagaaaaggagttgtcttctgagccccggacacccccagcccagaagggggctgctccgcctgcagctgtcagtgggcacagagagttggccttgtcctcaccagaggacctcacacaggactttgaggagttgaagcgtgaggagagaggtttgctggctgaacaaagagatacggggctgggtgagaaaccactccctgcagatgccacagagcaggggcacccgagcgcagccatccaggtgactcaaccctctggccctgtgctggagggagaacatgtggaaagggagaaagaggtagtcccagactccccaggggataaagggagcacaaacagaggcccagactctggggctgaggtcgagaaagagaaagaaacctgggaggaaaggaagcagagagaagcagagctgggcccagagaacactgcggccagggaggagagcgaagctgaggtaaaggaggatgtgatcgaaaaggccgagttagaggaaatggaggagactcatccttcagatgaggagggggaagagacaaaggctgagagcttttatcagaaacatacgcaggaagccctaaaggctagcccaaagagcagagaggctcttggcggccgggacctggggttccagggcaaggcacccgagaaggagacagcatcattcctaagcagtttggccacacctgcgggagccactgaacacgtctcttacattcaggatgagacaatccctggctactcagagactgagcagactatttcagatgagagatccatgatgagccagatgaacgcccagcgccgcccagatttcctacgagtacctatgacctctctgggcctgaaggtcctggcccctttgaagccagccaggctgcagatagtgctgttccagcctcctcgagcaaaacttatggggcacctgagactgaactcacctaccctcccaacatggtcgccgcccctctggctgaagaggaacatgtgtcctcagccacgtcaatcaccgagtgtgacaaactctcttcctttgccacatcggtggctgaggaccaatctgtggcttcactcacagctcccagacggaggagacaggcaagagctccctgttgctcgacactgtcacgagtatcccctcttcccgcacttgaaagccacccagggcctggactatgtgccgtcagctggtaccatctcccccacctcttccctggaagaagacaagggcttcaagtcaccaccctgtgaggatttctctgtgaccggggagtcggagaagaaaggagagactgtggggagaggcttgagcggggagaaggctgtggggaaggaggaaaaatatgtagtgacgtctgagaaactgtccggtcagtatgctgctgtgtttggtgcccctggacacaccctacccccgggggaaccagccctcggagaagtggaggaacggtgcctcagtccagatgacagcacggtgaagatggcttctcctccaccatctggcccacccagtgctgcccacacgccctttcaccagtctccagtggaagacaagtctgagccgcgagactttcaggaagattcctggggagaaacaaagcattctccaggtgtgagcaaggaagactctgaagagcagacggtgaagccagggcccgaggagggcacttcagaagaggggaagggacctcctaccaggagcccccaagcccaggacacgcctgtgagcattgctgggggtcagactggctgtactatccaactcttaccagaacaagacaaagccatagtgtttgagactggagaggcaggttcgattctaggagcagggaccctccctggagaagtgaggacatcaactgaagaagccactgaacctcagaaagatgaggtacttcgctttactgatcaaagcctttcccctgaagatgcagagtctctgtctgtcctcagtgtggtctccccagacactaccaaacaagaggccactcccaggtctccctgcagcctgaaagagcagcagccgcacaaagacctttggccaatggtgtctccagaagacacccagtcactttctttctcagaagagagtcctagcaaggagacctctctggatatctcttctaagcagctctctccagaaagccttggcaccctccagtttggagaactgaacctaggaaaggaagaaagggggcctgtgatgaaggcagaagacgactcttgccacctagctcctgtgtctattccagagccacacagggccacagtgtcacctagcacagatgagacccctgctgggactttacctggtggctctttttctcactctgcactgtcagtcgataggaagcactcacctggggagatcacgggccctggtggacactttatgacatctgatagctccctcaccaagagtcccgagtctttgtcaagtcccgccatggaagatctggccgtggagtgggaaggtaaagctccagggaaggagaaagaacctgagctaaagagtgaaacccgacagcaaaagggccagattctgccggagaaggttgctgttgtggagcaggacttgatcatacatcagaaagacggggctctggatgaggagaacaaacctggaaggcagcaggataagactccagaacagaaaggcagagacttggacgaaaaggacacggctgcagagctggacaaaggcccagaacccaaagaaaaagacttagaccgggaggaccagggccagagagcagggcctccagcagagaaggacaaggcctcagaacaaagggacacagacctgcaacagacccaggccacagaaccaagagacagagcacaagagcgcagagattcagaagaaaaggacaagagtttagagctgagagataggactcctgaagagaaagatagaatattagtacaggaagacagggctccagagcacagcatccctgaaccaacacagacagacagagctccagatcgcaaaggcacggatgataaagaacagaaggaggaggcctcagaagagaaagaacaggttttagaacaaaaagactgggccctaggaaaggagggtgagaccttggaccaagaggccagaactgctgaacagaaagatgagaccctaaaagaggacaaaactcagggacagaagagctctttcgtcgaagataaaaccacaacatcaaaagagacggtccttgaccaaaagtctgcagagaaggccgacagtgtggagcagcaggatggagccgccctggagaagaccagagctttggggctggaagagagcccagcagagggaagcaaggctcgagagcaggaaaagaaatactggaaggaacaggatgtggtccagggatggcgagaaacatctccaaccaggggagagccagtgggaggccagaaagagcctgttccagcctgggagggcaagtctcctgagcaagaagtccggtattggagggacagagacataacactacagcaggatgcatactggagggagctaagctgtgacaggaaggtctggttcccccatgagctagatggccaaggagcccgtccacggtactgtgaggaacgtgaaagcacttttcttgatgaggggccagatgaacaagaaataacccccctgcagcacactccccggagtccctggacctcggatttcaaggatttccaggagcccctgccacagaaggggctggaagtagagcgctggcttgctgagtcaccagttggcctgccaccagaggaagaggacaaactgacacgctcgccctttgagatcatctcccctccagcatccccacctgagatgactggacagagggttccttcagctccaggacaagagagccctgtcccagacactgagtccacagcacccatgaggaatgaacctaccaccccttcatggctagctgagatcccaccttgggtacctaaggacaggcctctgcctcctgcacccctctccccagctccagctcccccaacacctgccccagagccacatactcctgtgcccttctcctggggcttagctgaatatgacagtgtggtggctgccgtgcaggagggggcagcggagctggaaggcggcccatactccccactcgggaaggactatcgaaaagctgaaggggaaagggaaggagagggtggggctggagctcctgacagcagctccttcagtccaaaggtcccagaggctggtgagagccttgccaccagggacactgagcagactgagccagagcagagagagcccacaccctatcccgatgagagaagctttcagtatgcagacatctatgaacagatgatgcttactggactgggccctgcttgccccaccagggagcctccactgggggcatccggggactggcccccacacctctcaaccaaggaggaggctgctggctgcaatacttctgcagagaaggagacttcctcccctgcctcgccccaaaacctccaatctgacactccagctttcagctacgcatctctggcaggacccgctgtacctcccaggcaagaaccggatccaggacccaatgtggagcccagcatcacccctcccgcagtgccccctcgcgcccctatctccctgagcaaagacctgagtccccctcttaatggaagcactgtgagctgcagcccggacaggaggaccccatccccaaaggaaacgggccgaggtcactgggatgatggtaccaatgactcagacctggagaagggggcccgggaacagcccgagaaagagactcggtccccaagtccccatcaccccatgcctatgggccactcctcactgtggcctgaaaccgaggcatacagcagcctttcctcagactcacacctaggatctgtcgtccaagtctggacttccctgctcagtttggcttctcctccttgcagcctgctccccctcagctgccctctccagctgaacc

SEQ ID NO: 14220 - protein, 1414 aa, Rattus norvegicus
  ref <308>: DATABASE ACCESSION NUMBER: SWISS-Prot / CAA47316
  ref <309>: DATABASE ENTRY DATE: 2002-10-01
WKLVRHLDRIDSVLLTHIGADNLPGINGLLQRKVAELEEEQSQGSSSYSDWVKNLISPELGVVFFNVPDKLRLPDASRKAKRSIEEACLTLQHLNRLGIQAEPLYRVVSNTIEPLTLFHKMGVGRLDMYVLNPVKDSKEMQFLMQKWAGNSKAKTGIVLANGKEAEISVPYLTSITALVVWLPANPTEKIVRVLFPGNAPQNKILEGLEKLRHLDFLRYPVATQKDLAAGAVPANLKPSKIKHRADSKESLKAAPKTAVSKLAKREEVLEEGAKEARSELAKELAKTEKKAKNRLRSPQKNPPSPKGLRGESSEALKAEKRRLIKDKAGKKHLKEKISKLEEKKDKEKKEIKKERKELKKEEGRKEEKKDAKKDEKRKDTKPEVKKLSKPDLKPFTPEVRKTLYKAKAPGRVKVDKGRAARGEKELSSEPRTPPAQKGAAPPAAVSGHRELALSSPEDLTQDFEELKREERGLLAEQRDTGLGEKPLPADATEQGHPSAAIQVTQPSGPVLEGEHVEREKEVVPDSPGDKGSTNRGPDSGAEVEKEKETWEERKQREAELGPENTAAREESEAEVKEDVIEKAELEEMEETHPSDEEGEETKAESFYQKHTQEALKASPKSREALGGRDLGFQGKAPEKETASFLSSLATPAGATEHVSYIQDETIPGYSETEQTISDERSMMSQMNAQRRPDFLRVPMTSLGLKVLAPLKPARLQIVLFQPPRAKLMGHLRLNSPTLPTWSPPLWLKRNMCPQPRQSPSVTNSLPLPHRWLRTNLWLHSQLPDGGDRQELPVARHCHEYPLFPHLKATQGLDYVPSAGTISPTSSLEEDKGFKSPPCEDFSVTGESEKKGETVGRGLSGEKAVGKEEKYVVTSEKLSGQYAAVFGAPGHTLPPGEPALGEVEERCLSPDDSTVKMASPPPSGPPSAAHTPFHQSPVEDKSEPRDFQEDSWGETKHSPGVSKEDSEEQTVKPGPEEGTSEEGKGPPTRSPQAQDTPVSIAGGQTGCTIQLLPEQDKAIVFETGEAGSILGAGTLPGEVRTSTEEATEPQKDEVLRFTDQSLSPEDAESLSVLSVVSPDTTKQEATPRSPCSLKEQQPHKDLWPMVSPEDTQSLSFSEESPSKETSLDISSKQLSPESLGTLQFGELNLGKEERGPVMKAEDDSCHLAPVSIPEPHRATVSPSTDETPAGTLPGGSFSHSALSVDRKHSPGEITGPGGHFMTSDSSLTKSPESLSSPAMEDLAVEWEGKAPGKEKEPELKSETRQQKGQILPEKVAVVEQDLIIHQKDGALDEENKPGRQQDKTPEQKGRDLDEKDTAAELDKGPEPKEKDLDREDQGQRAGPPAEKDKASEQRDTDLQQTQATEPRDRAQERRDSEEKDKSLELRDRTPEEKDRILVQEDRAPEHSIPEPTQTD

SEQ ID NO: 14221 - DNA, 1244 bp, Rattus norvegicus
  ref <308>: DATABASE ACCESSION NUMBER: EMBL / X68041
  ref <309>: DATABASE ENTRY DATE: 1993-07-19
ggggaggcagctcagaggctctttctcaggcctctagctgggtctgtcctgtacttcaccagaggaaaaacgttcttgggagagcttgtcaggtgtggaacctcagccatggtggccttcttgttctgcaacctgctactggtggcctgtggctctgtcacctggaccatgtcagataccggagagtccggtgtcgacttagcagaccggcttgacctggttgagaagataggcgacacgcactccaaagacctggagatctggatggagctaggaaaacaacgggaggcggatgccagggagatgcacgcagtctgcagggtacagccctcagccatgctgcctcccgatcagccacagatcacaggcttggtcctcttccggcagctggggcccagctccagacttgaggcctccttcaatctggagggcttcccagccgagcagaacacctccaaccacgccatccacgtgcatgagttcggggacctgagccagggctgcgagtccaccggaccacactacaacccgctgggtgtgccgcacccacagcacccgggggacttcggcaacttcgtggtgcgcgatggccgcctttggaagcatcgaatgggcctggccacgtcactggccggaccgcactcgatcttgggccgcgctgtggtggtccacgctggcgaggacgacctgggtaaaggtggcaaccaggccagcgtgcagaacggcaacgcaggtcgccggctcgcctgctgcgtggtaggcaccagcaactcggaggcctgggagagccagacaaaggagcgcaagaagtggcggtgggagagcgagtgcaagaccacttaagcatcacccagggccgcctagcctagctgctgtgtgcatagatgcctccacacgcgcctctagacgcctccagtcatcctagaggtctctgggtgtcctagactgacgcttcccagacacctcaatcgcctctgtgcgccccacactcttccacataccccagacacctctgtatggctcagatgccttcaagaacctcctcggccacgtccacgagccccagatgttcccacgtgccctgggcactgttctcggagaccaggacactttttgtaacctaggaatcctttcacaccctatgcacttccacagacccaaactccttcgtgctctaggtccacctcgaactactttatgccccaagacaatcccataagcccctagcatccccacacttccgc

SEQ ID NO: 14222 - protein, 244 aa, Rattus norvegicus
  ref <308>: DATABASE ACCESSION NUMBER: SWISS-Prot / CAA48177
  ref <309>: DATABASE ENTRY DATE: 2002-06-15
MVAFLFCNLLLVACGSVTWTMSDTGESGVDLADRLDLVEKIGDTHSKDLEIWMELGKQREADAREMHAVCRVQPSAMLPPDQPQITGLVLFRQLGPSSRLEASFNLEGFPAEQNTSNHAIHVHEFGDLSQGCESTGPHYNPLGVPHPQHPGDFGNFVVRDGRLWKHRMGLATSLAGPHSILGRAVVVHAGEDDLGKGGNQASVQNGNAGRRLACCVVGTSNSEAWESQTKERKKRRRESECKTT

SEQ ID NO: 14223 - DNA, 1984 bp, Homo sapiens
  ref <308>: DATABASE ACCESSION NUMBER: Refseq / NM_003102
  ref <309>: DATABASE ENTRY DATE: 2002-11-05
ggatccagagatttagattttttataagctttcctgccaccgaaacgggtgtttgggacctcacgaggccctgttcattcttcgtcgctgcgctccccactctgtactggatgcatttactgacgttgttgtctccgtccccagagtatgaacccccaaggtgactcatgcagctgtgggtgcccggcatacagcatggtgactggaatggatgagcacccaataaacatttgttgcaggaatgcaggaggacgggcaggccagcaagcaggctgcctggtttttcccacatgggcttttctgggaaagaagagcttctatttttggaaagggctgctatgattgagaaaagttcatggcagcaaaaaaaggacagacgtcgggagggaaacactcctagttctcccagacaacacattttttaaaaagactccttcatctctttaataataacggtaacgacaatgacaatgatgattacttatgagtgcggctagtgccagccactgtgttgtcactgggcgagtaatgatctcattggatcttcacggtgggcgtgcggggctccagggacagcctgcgttcctgggctggctgggtgcagctctcttttcaggagagaaagctctcttggaggagctggaaaggtgcccgactccagccatgctggcgctactgtgttcctgcctgctcctggcagccggtgcctcggacgcctggacgggcgaggactcggcggagcccaactctgactcggcggagtggatccgagacatgtacgccaaggtcacggagatctggcaggaggtcatgcagcggcgggacgacgacggcacgctccacgccgcctgccaggtgcagccgtcggccacgctggacgccgcgcagccccgggtgaccggcgtcgtcctcttccggcagcttgcgccccgcgccaagctcgacgccttcttcgccctggagggcttcccgaccgagccgaacagctccagccgcgccatccacgtgcaccagttcggggacctgagccagggctgcgagtccaccgggccccactacaacccgctggccgtgccgcacccgcagcacccgggcgacttcggcaacttcgcggtccgcgacggcagcctctggaggtaccgcgccggcctggccgcctcgctcgcgggcccgcactccatcgtgggccgggccgtggtcgtccacgctggcgaggacgacctgggccgcggcggcaaccaggccagcgtggagaacgggaacgcgggccggcggctggcctgctgcgtggtgggcgtgtgcgggcccgggctctgggagcgccaggcgcgggagcactcagagcgcaagaagcggcggcgcgagagcgagtgcaaggccgcctgagcgcggcccccacccggcggcggccagggacccccgaggcccccctctgcctttgagcttctcctctgctccaacagacaccttccactctgaggtctcaccttcgcctctgctgaagtctccccgcagccctctccacccagaggtctccctataccgagacccaccatccttccatcctgaggaccgccccaaccctcggagccccccactcagtaggtctgaaggcctccatttgtaccgaaacaccccgctcacgctgacagcctcctaggctccctgaggtacctttccacccagaccctccttccccaccccataagccctgagactcccgcctttgacctgacgatcttcccccttcccgccttcaggttcctcctaggcgctcagaggccgctctggggggttgcctcgagtccccccacccctccccacccaccaccgctcccgcggcaagccagcccgtgcaacggaagccaggccaactgccccgcgtcttcagctgtttcgcatccaccgccaccccactgagagctgctcctttgggggaatgtttggcaacctttgtgttacagattaaaaattcagcaattca

SEQ ID NO: 14224 - protein, 240 aa, Homo sapiens
  ref <308>: DATABASE ACCESSION NUMBER: Refseq / NP_003093
  ref <309>: DATABASE ENTRY DATE: 2002-11-05
MLALLCSCLLLAAGASDAWTGEDSAEPNSDSAEWIRDMYAKVTEIWQEVMQRRDDDGTLHAACQVQPSATLDAAQPRVTGVVLFRQLAPRAKLDAFFALEGFPTEPNSSSRAIHVHQFGDLSQGCESTGPHYNPLAVPHPQHPGDFGNFAVRDGSLWRYRAGLAASLAGPHSIVGRAVVVHAGEDDLGRGGNQASVENGNAGRRLACCVVGVCGPGLWERQAREHSERKKRRRESECKAA

SEQ ID NO: 14225 - DNA, 1647 bp, Rattus norvegicus
  ref <308>: DATABASE ACCESSION NUMBER: EMBL / X83094
  ref <309>: DATABASE ENTRY DATE: 2000-05-27
cttccgaaaagtagtccacattgagcagggtggcctggtcaagcctgagagggatgacaccgagttccagcatccatgtttcctgcgtggccaggaacagctccttgagaatatcaagaggaaagtgaccagcgtgtccaccctgaagagtgaggacataaaaatacgccaggacagtgtcaccaggctgttgacagatgtgcagctgatgaaggggaaacaggagtgtatggactccaagctcctggccatgaagcacgagaacgaggccctgtggcgggaggtggccagccttcggcagaagcatgcccagcagcaaaaagttgtcaacaagctcatccaattcctgatctcactggtgcagtcgaaccggatcctgggggtgaaaagaaagatccctctgatgttgagtgacagcagctcagcacactctgtgcccaagtatggtcgacagtactccctggagcatgtccatggtcccggcccatactcagctccatctccagcctacagcagctctagcctttactcctctgatgctgtcaccagctctgggcccataatctccgatatcactgagctggctcccaccagccctttggcctccccaggcaggagcatagatgagaggcctctgtccagcagcaccctggtccgtgtcaaggaagagccccccagcccacctcatagccctcgggtactggaggcaagccctgggcgcccagcctccatggatacccctttgtccccaactgccttcattgactccatccttcgagagagcgaacctacccctgctgcctcaaacacagcccctatggacacaaccggagcccaagcccctgcacacccagccccctccacccctgagaagtgcctcagcgtagcctgcctagacaagaacgagctaagtgatcacctggatgccatggactccaacctggacaacctgcagaccatgctgacaagccacggcttcagtgtggacaccagtgccctgctggacctgttcagcccctcggtgaccatgcccgacatgagcctgcctgacctggacagcagcctggccagcattcaggaacttctatctccccaagagcctcccaggcctattgaggcagagaatagtaacgccgactcaggaaagcagctggtgcactacacggctcagcctctgttcctgctggaccctgatgctgtggacacagggagcagtgaactgcctgtgctctttgagctgggggagagctcctacttctctgagggagatgactacacggatgatcccaccatctctcttctgacgggcactgaaccccacaaagccaaggaccccactgtctcctagaggtttcagttgtcaggctggcttgggcctggcccccagcctattcctaggacacggctggtcctggggagacaagacagttgggtagtccagggaatcctaggtcaagccagcacaaccccagtggagcacagatgggacttgggcttgggcagtaccttggatcaagaggaagatcctgaaggctgcatacctgctgccttcaccccagccccaagtctgctctctggtcagagcttcacagccacacttggactgaccctgcaggttgttcataaaattgtattttgatttttaat

SEQ ID NO: 14226 - protein, 448 aa, Rattus norvegicus
  ref <308>: DATABASE ACCESSION NUMBER: SWISS-Prot / CAA58149
  ref <309>: DATABASE ENTRY DATE: 2001-12-01
FRKVVHIEQGGLVKPERDDTEFQHPCFLRGQEQLLENIKRKVTSVSTLKSEDIKIRQDSVTRLLTDVQLMKGKQECMDSKLLAMKHENEALWREVASLRQKHAQQQKVVNKLIQFLISLVQSNRILGVKRKIPLMLSDSSSAHSVPKYGRQYSLEHVHGPGPYSAPSPAYSSSSLYSSDAVTSSGPIISDITELAPTSPLASPGRSIDERPLSSSTLVRVKEEPPSPPHSPRVLEASPGRPASMDTPLSPTAFIDSILRESEPTPAASNTAPMDTTGAQAPAHPAPSTPEKCLSVACLDKNELSDHLDAMDSNLDNLQTMLTSHGFSVDTSALLDLFSPSVTMPDMSLPDLDSSLASIQELLSPQEPPRPIEAENSNADSGKQLVHYTAQPLFLLDPDAVDTGSSELPVLFELGESSYFSEGDDYTDDPTISLLTGTEPHKAKDPTVS

SEQ ID NO: 14227 - DNA, 2156 bp, Homo sapiens
  ref <308>: DATABASE ACCESSION NUMBER: Refseq / NM_005526
  ref <309>: DATABASE ENTRY DATE: 2000-11-01
cgggcccgttgcaagatggcggcggccatgctgggccccggggctgtgtgtgcgcagcgggcggcggcgcggcccggaaggctggcgcggcgacggcgttagcccggccctcggcccctctttgcggccgctccctccgcctattccctccttgctcgagatggatctgcccgtgggccccggcgcggcggggcccagcaacgtcccggccttcctgaccaagctgtggaccctcgtgagcgacccggacaccgacgcgctcatctgctggagcccgagcgggaacagcttccacgtgttcgaccagggccagtttgccaaggaggtgctgcccaagtacttcaagcacaacaacatggccagcttcgtgcggcagctcaacatgtatggcttccggaaagtggtccacatcgagcagggcggcctggtcaagccagagagagacgacacggagttccagcacccatgcttcctgcgtggccaggagcagctccttgagaacatcaagaggaaagtgaccagtgtgtccaccctgaagagtgaagacataaagatccgccaggacagcgtcaccaagctgctgacggacgtgcagctgatgaaggggaagcaggagtgcatggactccaagctcctggccatgaagcatgagaatgaggctctgtggcgggaggtggccagccttcggcagaagcatgcccagcaacagaaagtcgtcaacaagctcattcagttcctgatctcactggtgcagtcaaaccggatcctgggggtgaagagaaagatccccctgatgctgaacgacagtggctcagcacattccatgcccaagtatagccggcagttctccctggagcacgtccacggctcgggcccctactcggccccctccccagcctacagcagctccagcctctacgcccctgatgctgtggccagctctggacccatcatctccgacatcaccgagctggctcctgccagccccatggcctcccccggcgggagcatagacgagaggcccctatccagcagccccctggtgcgtgtcaaggaggagccccccagcccgcctcagagcccccgggtagaggaggcgagtcccgggcgcccatcttccgtggacaccctcttgtccccgaccgccctcattgactccatcctgcgggagagtgaacctgcccccgcctccgtcacagccctcacggacgccaggggccacacggacaccgagggccggcctccctcccccccgcccacctccacccctgaaaagtgcctcagcgtagcctgcctggacaagaatgagctcagtgaccacttggatgctatggactccaacctggataacctgcagaccatgctgagcagccacggcttcagcgtggacaccagtgccctgctggacctgttcagcccctcggtgaccgtgcccgacatgagcctgcctgaccttgacagcagcctggccagtatccaagagctcctgtctccccaggagccccccaggcctcccgaggcagagaacagcagcccggattcagggaagcagctggtgcactacacagcgcagccgctgttcctgctggaccccggctccgtggacaccgggagcaacgacctgccggtgctgtttgagctgggagagggctcctacttctccgaaggggacggcttcgccgaggaccccaccatctccctgctgacaggctcggagcctcccaaagccaaggaccccactgtctcctagaggccccggaggagctgggccagccgcccacccccacccccagtgcagggctggtcttggggaggcagggcagcctcgcggtcttgggcactggtgggtcggccgccatagccccagtaggacaaacgggctcgggtctgggcagcacctctggtcaggagggtcaccctggcctgccagtctgccttcccccaaccccgtgtcctgtggtttggttggggcttcacagccacacctggactgaccctgcaggttgttcatagtcagaattgtattttggatttttacacaactgtcccgttccccgctccacagagatacacagatatatacacacagtggatggacggacaagacaggcagagatctataaacagacaggctctaaaaaaaaaaaaaaaaaaaa

SEQ ID NO: 14228 - protein, 529 aa, Homo sapiens
  ref <308>: DATABASE ACCESSION NUMBER: Refseq / NP_005517
  ref <309>: DATABASE ENTRY DATE: 2000-11-01
MDLPVGPGAAGPSNVPAFLTKLWTLVSDPDTDALICWSPSGNSFHVFDQGQFAKEVLPKYFKHNNMASFVRQLNMYGFRKVVHIEQGGLVKPERDDTEFQHPCFLRGQEQLLENIKRKVTSVSTLKSEDIKIRQDSVTKLLTDVQLMKGKQECMDSKLLAMKHENEALWREVASLRQKHAQQQKVVNKLIQFLISLVQSNRILGVKRKIPLMLNDSGSAHSMPKYSRQFSLEHVHGSGPYSAPSPAYSSSSLYAPDAVASSGPIISDITELAPASPMASPGGSIDERPLSSSPLVRVKEEPPSPPQSPRVEEASPGRPSSVDTLLSPTALIDSILRESEPAPASVTALTDARGHTDTEGRPPSPPPTSTPEKCLSVACLDKNELSDHLDAMDSNLDNLQTMLSSHGFSVDTSALLDLFSPSVTVPDMSLPDLDSSLASIQELLSPQEPPRPPEAENSSPDSGKQLVHYTAQPLFLLDPGSVDTGSNDLPVLFELGEGSYFSEGDGFAEDPTISLLTGSEPPKAKDPTVS

SEQ ID NO: 14229 - DNA, 2439 bp, Rattus norvegicus
  misc_feature (1)..(2439): n=a, c, g or t
  ref <308>: DATABASE ACCESSION NUMBER: EMBL / X90475
  ref <309>: DATABASE ENTRY DATE: 1995-09-11
tgaagagattgtccctggtccaaagtcaaggtacagaattaaagtggaaggcaaaaagcacactttgatcatagaaggagcgacaaaggctgacagtgcggagtactcggtcatgacaaccggaggacagtcatcggctaaactaagtgttgacttgagacctctaaagatcacaacgcctctgactgatcagactgtaaaacttgggaaagaagtatgcctgaagtgtgaaatctctgaaaatgtaccaggaaaatggacaaaaaatggactccctgttcaggagggggaacgtctgaaggtcgttcacaagggaaggatccacaagttagtcatagccaatgctctcattgaagacgaaggtgaatatgtgtttacaccagatgccatcactgttcctttggtctgccaaattcacgtcatcgaccctcccaagatcatccttgacggcctggaggctgataacaccgtgacagtgattgccggaagcaagcttcgtctggagattcccgtcacaggggaaccacctcccaaagccatctggagcagagcagataaggctatcatggagggcagtggtcggataagggcagaatcctaccccgacagcagcacgctggtcattgacgtggcagagagagatgactctggtgtgtacaacataaatctgaaaaatgaagctggagaagcacacgcaagcatcaagttaaggttgtggatatccctgatcctccggttggcaccaaatgtgacagaagtgggagatgactggtgcatcatgaactgggagcctcctgtctatgatggagggtctccaattttaggatactttattgagaggaaaaagaagcaaagctccaggtggatgagactgaattttgatctctgcaaagagacaacttttgagcccaagaagatgattgaaggggtggcctacgaggtccgcatatttgcggtcaatgccattggcatctccaagcccagtatgccctccaagccctttgttcctttggctgtgaccagccctccaactcttctggctgtcgactccgtgaccgactcctctgtgacaatgaagtggaggcccccagaccagattggtgctgcaggtttgagtggctatgtgctagagtattgctttgaaggaagtacatcagcaaaacagtctaatgaaaatggggaggctgcgaatgatctaccagctgaggactggtcactgcaaacacagaccggatcgacaagacccaagttcaccatcactggtctgcccacggatgcaaagatctttgtacgcgtgaaggctattaacgcggctggggccagtgagaccaagtactattctcagcccatccttgtgaaggaaatcattgagccaccaaagattcgcatcccaaggcacctgaagcaaacttacatccgtagagttggagaagctgtaaatctggtgattcctttccagggcaaaccaagaccagaactgacctggaagaaggacggtgcagaaatcgacaagaatcaaataaacattcgcaactcagagactgataccatcatattcattaggaaagcagagcgcagccactcaggcaaatacgacctggaggtcaaggtggataagtacgtggaaaacgcctcgatcgacatccagatcgttgaccgcccaggcccaccccaggctgtgactattgaagatgtgtggggagagaatgttgctctaacatggacaccaccaaaggatgatgggaatgctgccatcacagggtacaccatccagaaggccgacaagaaaagcatggaatggttcgccgtcattgagcattaccaccgaaccaatgccaccattaccgagctggtcataggaaacnnnnnnnnnnnnnnagaaaatcccaaagcccgaaatcacctggatgaaaaacaaagtccccattgtggatgacccaagatacagaatgttcagcaaccaaggagtctgtaccctggagatccgtaagcctagtccctatgacggaggcacgtactgcgcaaagcagtcaatgacctcgggacagtggagatcgaatgcaaactggaggtgaaactggaggtgaaagttgtagcacagtaaggatgtttgaatgtatattgtcacccaaggtgggctgtaccttctacgaggctcctcctagcacaggcgtgcctccaaacataatcgattcatatttgcgagacttacagtcaagcaatccggaggaatactgagggctgggcacggcctctacacaccagtgccttgacattcgattgaaaacggaaagcattttctggttttctcccaggccctcaaatgtggtcattttctctcctcctaaccttgaagaaagaaagaaaaataaattgtttgcacagatggcttgattaaaaaacgcaaacagataaaaaaaaaaaaaaaaaaaaaaaaaa

SEQ ID NO: 14230 - protein, 621 aa, Rattus norvegicus
  ref <308>: DATABASE ACCESSION NUMBER: SWISS-Prot / Q63518
  ref <309>: DATABASE ENTRY DATE: 1999-07-15
EEIVPGPKSRYRIKVEGKKHTLIIEGATKADSAEYSVMTTGGQSSAKLSVDLRPLKITTPLTDQTVKLGKEVCLKCEISENVPGKWTKNGLPVQEGERLKVVHKGRIHKLVIANALIEDEGEYVFTPDAITVPLVCQIHVIDPPKIILDGLEADNTVTVIAGSKLRLEIPVTGEPPPKAIWSRADKAIMEGSGRIRAESYPDSSTLVIDVAERDDSGVYNINLKNEAGEAHASIKLRLWISLILRLAPNVTEVGDDWCIMNWEPPVYDGGSPILGYFIERKKKQSSRWMRLNFDLCKETTFEPKKMIEGVAYEVRIFAVNAIGISKPSMPSKPFVPLAVTSPPTLLAVDSVTDSSVTMKWRPPDQIGAAGLSGYVLEYCFEGSTSAKQSNENGEAANDLPAEDWSLQTQTGSTRPKFTITGLPTDAKIFVRVKAINAAGASETKYYSQPILVKEIIEPPKIRIPRHLKQTYIRRVGEAVNLVIPFQGKPRPELTWKKDGAEIDKNQINIRNSETDTIIFIRKAERSHSGKYDLEVKVDKYVENASIDIQIVDRPGPPQAVTIEDVWGENVALTWTPPKDDGNAAITGYTIQKADKKSMEWFAVIEHYHRTNATITELVIGN

SEQ ID NO: 14231 - DNA, 3575 bp, Homo sapiens
  ref <308>: DATABASE ACCESSION NUMBER: Refseq / NM_004533
  ref <309>: DATABASE ENTRY DATE: 2002-11-05
cgggaggaggtcccccgacatgcctgaggcaaaaccagcggccaaaaaggcccccaaaggcaaagatgcccccaaaggagcccccaaggaggctccccctaaggaggctcctgcagaggcccccaaagaagccccacccgaggaccagtccccgactgcagaggagcccaccggcgttttcctgaagaagccggactccgtctcagtggagactgggaaggacgcagtggtcgtggccaaggtgaacgggaaggagctcccagacaaaccgaccatcaagtggttcaaggggaagtggctggagctgggcagcaagagtggcgcccgcttctccttcaaggagtcccacaactccgccagcaatgtgtacaccgtggagctgcacattgggaaggtggtactgggggaccgtgggtattaccgcctcgaggtcaaagccaaggacacctgtgacagctgtggcttcaacatcgatgtggaggcaccccgtcaggatgcctctgggcagagtctagaaagcttcaagcgtacgagtgaaaagaagtcggatactgcaggtgagctggatttcagtggcctgttgaagaagagggaggtggtggaggaggagaagaagaagaaaaagaaagatgacgatgacctaggcatccccccggagatttgggagctcctgaaaggggcaaagaagagcgagtacgagaaaatcgccttccagtatggcatcaccgacctccggggcatgctgaagcggctgaaaaaggctaaggtcgaggtcaagaagagtgcagcattcacaaagaagctggatccagcctaccaagtggacagaggcaacaagatcaagttgatggtagagatcagcgacccagacctgaccctcaagtggttcaagaacggccaggagatcaaaccaagcagcaagtacgtgtttgagaacgttggtaagaagcgaattcttaccatcaacaagtgcacgctggcggatgacgctgcctatgaagtagctgtcaaggatgagaagtgtttcaccgagctcttcgtcaaagaacctccagtcctaattgtcacacctcttgaggaccagcaggtgtttgtgggtgaccgggtggaaatggcagtggaggtgtcagaagagggtgcccaggtgatgtggatgaaagatggtgtggaactgactcgggaggattccttcaaggcccggtaccgcttcaagaaggacgggaagcgccacatcctcatcttctcagacgtggtccaggaggacaggggtcgctatcaggtcataaccaatggcggccagtgtgaggccgagctgattgtggaagagaaacagctggaggtcctgcaggacatcgcggatctgacggtgaaggcctcagaacaagctgtgttcaagtgcgaggtgtctgatgagaaagtgacgggcaagtggtataagaatggggtcgaggtgcggcccagcaagaggatcaccatttcccatgtaggcaggttccacaagctggtgatcgatgacgtccgccccgaggatgagggagactacacgtttgtgcctgacggctacgcccttggttcgctctcggccaagctcaacttcctggaaatcaaggtggagtacgttcccaagcaagagccaccaaagatccacttggattgctcggggaagacctcagagaatgcgattgtggttgtggctggaaacaagctgaggcttgacgtgtccatcacaggggagccccctcccgtcgctacctggctgaagggagatgaggtattcacgaccaccgagggcaggacccgcatcgagaagcgggtggactgcagcagctttgtgattgagagtgcgcagcgggaagacgagggccgctacaccatcaaggtcaccaaccccgtcggcgaggacgtggcttccatcttcctgcaagttgtagatgtcccagaccccccggaggctgtgcgcatcacctcggttggagaggattgggccatccttgtctgggagccaccaatgtacgatggggggaagccagtcaccgggtacctcgtagagcggaagaagaagggctctcagcgctggatgaagctgaactttgaggtcttcacagagaccacctatgagtccaccaagatgatcgagggcatcctctatgagatgcgtgtcttcgccgtcaatgctataggggtctcccagcccagcatgaacaccaagccttttatgcctattgcacccacgagtgaacccctgcacctgatagtggaggatgtgacagacaccaccaccacactcaagtggaggcctccgaacaggatcggggcaggtggcatcgatgggtacctggtggagtactgcctggaaggctccgaggaatgggtccctgccaacaccgagcccgtggagcgctgtggcttcaccgtcaagaatctcccgaccggagccagaatcctcttccgagtagttggggtcaacatcgcggggcgcacggagccggccaccctggcccagccggtcaccatcagggagattgcggagccacccaagatccggcttccccgccatctccgccagacctacatccgcaaagtgggcgagcagctcaaccttgtcgtccccttccagggaaagccccggccccaggtggtgtggaccaagggcggggccccgctggacacctcccgcgtgcacgtgcggaccagcgacttcgacaccgtgttcttcgtgcgccaggcggcccgctccgactccggggagtacgagctgagcgtgcagatcgagaacatgaaggacaccgccaccatccgcatccgcgttgtggaaaaggctgggccccccataaacgtgatggtgaaggaggtgtggggcacgaacgcgctggtggagtggcaggcccccaaagatgatgggaacagtgagatcatggggtatttcgtccagaaagcagacaaaaaaaccatggagtggttcaacgtctatgaacgtaacaggcacactagctgtactgtgtccgaccttatcgtgggcaatgaatactatttccgagtttacaccgagaacatctgtgggctcagtgactcacctggtgtctccaagaacacggcccgcatcctcaagacaggaatcaccttcaaaccgttcgagtataaggagcatgacttccggatggctcccaagttcctgacacctctcatagaccgcgtggtcgtggctgggtactcggcagccctcaactgtgctgtcagaggccacccgaagccgaaggtggtctggatgaagaacaagatggaaatccgtgaagatcccaagttcctgataaccaattaccaaggagtcctgacgctgaacatccgtcgcccctcgcccttcgacgctgggacttacacctgccgggccgtcaacgagctgggcgaggcgctggctgagtgcaagctggaggtccgagtgccgcagtgagacctgtcccctacctgccaagacaattggtggtggagtcctgaccccaatccccaacctcccaggactgtgttctttctggagttttcgctgagaacaaaacagtgttgtctggaaaaaaaaaaaa

SEQ ID NO: 14232 - protein, 1142 aa, Homo sapiens
  ref <308>: DATABASE ACCESSION NUMBER: Refseq / NP_004524
  ref <309>: DATABASE ENTRY DATE: 2002-11-05
MPEAKPAAKKAPKGKDAPKGAPKEAPPKEAPAEAPKEAPPEDQSPTAEEPTGVFLKKPDSVSVETGKDAVVVAKVNGKELPDKPTIKWFKGKWLELGSKSGARFSFKESHNSASNVYTVELHIGKVVLGDRGYYRLEVKAKDTCDSCGFNIDVEAPRQDASGQSLESFKRTSEKKSDTAGELDFSGLLKKREVVEEEKKKKKKDDDDLGIPPEIWELLKGAKKSEYEKIAFQYGITDLRGMLKRLKKAKVEVKKSAAFTKKLDPAYQVDRGNKIKLMVEISDPDLTLKWFKNGQEIKPSSKYVFENVGKKRILTINKCTLADDAAYEVAVKDEKCFTELFVKEPPVLIVTPLEDQQVFVGDRVEMAVEVSEEGAQVMWMKDGVELTREDSFKARYRFKKDGKRHILIFSDVVQEDRGRYQVITNGGQCEAELIVEEKQLEVLQDIADLTVKASEQAVFKCEVSDEKVTGKWYKNGVEVRPSKRITISHVGRFHKLVIDDVRPEDEGDYTFVPDGYALGSLSAKLNFLEIKVEYVPKQEPPKIHLDCSGKTSENAIVVVAGNKLRLDVSITGEPPPVATWLKGDEVFTTTEGRTRIEKRVDCSSFVIESAQREDEGRYTIKVTNPVGEDVASIFLQVVDVPDPPEAVRITSVGEDWAILVWEPPMYDGGKPVTGYLVERKKKGSQRWMKLNFEVFTETTYESTKMIEGILYEMRVFAVNAIGVSQPSMNTKPFMPIAPTSEPLHLIVEDVTDTTTTLKWRPPNRIGAGGIDGYLVEYCLEGSEEWVPANTEPVERCGFTVKNLPTGARILFRVVGVNIAGRTEPATLAQPVTIREIAEPPKIRLPRHLRQTYIRKVGEQLNLVVPFQGKPRPQVVWTKGGAPLDTSRVHVRTSDFDTVFFVRQAARSDSGEYELSVQIENMKDTATIRIRVVEKAGPPINVMVKEVWGTNALVEWQAPKDDGNSEIMGYFVQKADKKTMEWFNVYERNRHTSCTVSDLIVGNEYYFRVYTENICGLSDSPGVSKNTARILKTGITFKPFEYKEHDFRMAPKFLTPLIDRVVVAGYSAALNCAVRGHPKPKVVWMKNKMEIREDPKFLITNYQGVLTLNIRRPSPFDAGTYTCRAVNELGEALAECKLEVRVPQ

SEQ ID NO: 14233 - DNA, 2615 bp, Rattus norvegicus
  ref <308>: DATABASE ACCESSION NUMBER: EMBL / X91988
  ref <309>: DATABASE ENTRY DATE: 1996-02-29
ggggccaagcgtcaccccgggcggaccgagcaccggcgacgacccggagcgcttgcactgggagggagcaagcgggcagcgcgagagagctgcggcggccggaaagaccgctggcactggtggggcagaacgaggttgtaagccatggcaatgtggatacaggctcagcagctccagggcgatgcccttcatcagatgcaggccttgtacggccagcatttccccatcgaggtgcgacattatttatcccagtggatcgaaagtcaagcctgggactcaatagatcttgataatccacaggagaacattaaggccacccagctcctggagggcctggtgcaggagctgcagaagaaggcagaacaccaggtgggggaagatgggtttttgctgaagatcaagctggggcactatgccacgcagctccagaacacgtatgaccgctgccccatggagctggttcgctgtatccggcacattctatacaatgaacagaggctggtccgagaagccaacaacggaagctctccggctggaagtcttgctgacgccatgtcccagaagcaccttcagatcaaccaaacgtttgaggagctgcgtctgatcacacaggacacggagagcgagctgaagaagctgcagcagacccaagagtacttcatcatccagtaccaggagagcctgcggatccaagctcagtttgcccagctggcccaactgaacccccaggagcgcatgagcagggagacagccctccagcagaagcaagtgtccctggagacctggctgcagcgagaggcacagacactgcagcagtaccgcgtggagctggctgagaagcaccagaagaccctgcagctgctgcggaagcagcagaccatcatcctggacgacgagctgatccagtggaagcggcgacagcagctggccgggaatgggggtcctcctgagggcagcctggatgtgctgcagtcctggtgtgagaagctggccgagatcatctggcagaaccggcagcagatccgcaggctggagcacctgtgccagcagctgcccatcccaggccccgtggaggagatgctggccgaggtcaacgccaccatcacagacatcatctcagccctgtcgaccagcacgttcatcatcgagaagcagcctcctcaggtcctgaagacccagaccaagttcgcggccaccgtgcgcctgctggtgggcgggaagctgaacgtgcacatgaaccctccgcaggtgaaggcaaccatcatcagcgagcagcaggccaagtccctactcaagaacgagaacacccgcaatgattatagcggcgagatcctgaacaactgctgcgtcatggagtaccaccaggccacaggcaccctcagcgcccacttcagaaacatgtccctgaaacgaatcaagaggtctgaccgccgtggtgcggagtcggtcacggaagagaagttcacaatcttgtttgactcacagttcagtgttggtggaaatgagctggtctttcaagtcaagaccttgtcgctcccggtggtggtgatcgtgcatggcagccaggacaacaatgcgacggctaccgtcctgtgggacaacgcctttcgagagcctggcagggtgccatttgccgtgccggacaaggtgctgtggccgcagctgtgtgaggcgctcaacatgaagttcaaggctgaggtgcagagcaaccggggcctgaccaaggagaacctggtgttcctggcacagaaactgttcaacagcagcagcaaccacctcgaggactacaacagcatgtccgtgtcctggtcccagttcaaccgggagaatctgccaggacggaattacactttctggcaatggtttgacggtgtgatggaggtgttaaagaaacatctcaagcctcactggaacgatggggcaatccttgggtttgtgaacaagcagcaggcccacgacctgctcatcaacaagccagatgggaccttcctgctgcgcttcagcgactcggaaatcgggggcatcaccattgcttggaagtttgactcccaggagagaatgttttggaatctgatgccttttaccacaagagacttctctatccggtccctcgctgaccgcctgggggacctgaattacctcatctacgtgttccctgatcggccaaaggatgaggtatattctaagtactacacaccagtcccgtgtgagcgcgcaacggcgaaagcagctgacggatacgtgaagccgcagatcaagcaagtggtccccgagtttgtcaatgcttcaacagatgcagggagcggcgccacttacatggaccaggctccttccccagtggtgtgccctcaggctcactataacatgtacccacagaatcccgactctgtcctcgataccgatggggatttcgatctggaagacacgatggacgtggcacggcgtgtggaagagctcttaggccggcccatggacagtcagtggatccctcacgcgcagtcatgaccagacctcaccgcctgcagcttcactgtcctcctggaggacccttcctgtgatgtttaattccatgaatcgcttctctttggaaacaatattcgtaatgtgaagtgtta

SEQ ID NO: 14234 - protein, 786 aa, Rattus norvegicus
  ref <308>: DATABASE ACCESSION NUMBER: SWISS-Prot / CAA63043
  ref <309>: DATABASE ENTRY DATE: 2002-06-15
MAMWIQAQQLQGDALHQMQALYGQHFPIEVRHYLSQWIESQAWDSIDLDNPQENIKATQLLEGLVQELQKKAEHQVGEDGFLLKIKLGHYATQLQNTYDRCPMELVRCIRHILYNEQRLVREANNGSSPAGSLADAMSQKHLQINQTFEELRLITQDTESELKKLQQTQEYFIIQYQESLRIQAQFAQLAQLNPQERMSRETALQQKQVSLETWLQREAQTLQQYRVELAEKHQKTLQLLRKQQTIILDDELIQWKRRQQLAGNGGPPEGSLDVLQSWCEKLAEIIWQNRQQIRRLEHLCQQLPIPGPVEEMLAEVNATITDIISALSTSTFIIEKQPPQVLKTQTKFAATVRLLVGGKLNVHMNPPQVKATIISEQQAKSLLKNENTRNDYSGEILNNCCVMEYHQATGTLSAHFRNMSLKRIKRSDRRGAESVTEEKFTILFDSQFSVGGNELVFQVKTLSLPVVVIVHGSQDNNATATVLWDNAFREPGRVPFAVPDKVLWPQLCEALNMKFKAEVQSNRGLTKENLVFLAQKLFNSSSNHLEDYNSMSVSWSQFNRENLPGRNYTFWQWFDGVMEVLKKHLKPHWNDGAILGFVNKQQAHDLLINKPDGTFLLRFSDSEIGGITIAWKFDSQERMFWNLMPFTTRDFSIRSLADRLGDLNYLIYVFPDRPKDEVYSKYYTPVPCERATAKAADGYVKPQIKQVVPEFVNASTDAGSGATYMDQAPSPVVCPQAHYNMYPQNPDSVLDTDGDFDLEDTMDVARRVEELLGRPMDSQWIPHAQS

SEQ ID NO: 14235 - DNA, 2776 bp, Homo sapiens
  misc_feature (1)..(2776): n=a, c, g or t
ggagccgtcaccccgggcggggacccagcgcaggcaactccgcgcggcggcccggccgagggagggagcgagcgggcgggcgggcaagccagacagctgggccggagcagccgcgggcgcccgaggggccgagcgagattgtaaaccatggctgtgtggatacaagctcagcagctccaaggagaagcccttcatcagatgcaagcgttatatggccagcattttcccattgaggtgcggcattatttatcccagtggattgaaagccaagcatgggactcagtagatcttgataatccacaggagaacattaaggccacccagctcctggagggcctggtgcaggagctgcagaagaaggcagagcaccaggtgggggaagatgggtttttactgaagatcaagctggggcactatgccacacagctccagaacacgtatgaccgctgccccatggagctggtccgctgcatccgccatatattgtacaatgaacagaggttggtccgagaagccaacaatggtagctctccagctggaagccttgctgatgccatgtcccagaaacacctccagatcaaccagacgtttgaggagctgcgactggtcacgcaggacacagagaatgagttaaaaaagctgcagcagactcaggagtacttcatcatccagtaccaggagagcctgaggatccaagctcagtttggcccgctggcccagctgagcccccaggagcgtctgagccgggagacggccctccagcagaagcaggtgtctctggaggcctggttgcagcgtgaggcacagacactgcagcagtaccgcgtggagctggccgagaagcaccagaagaccctgcagctgctgcggaagcagcagaccatcatcctggatgacgagctgatccagtggaagcggcggcagcagctggccgggaacggcgggccccccgagggcagcctggacgtgctacagtcctggtgtgagaagttggccgagatcatctggcagaaccggcagcagatccgcagggctgagcacctctgccagcagctgcccatccccggcccagtggaggagatgctggccgaggtcaacgccaccatcacggacattatctcagccctggtgaccagcacattcatcattgagaagcagcctcctcaggtcctgaagacccagaccaagtttgcagccaccgtacgcctgctggtgggcgggaagctgaacgtgcacatgaatcccccccaggtgaaggccaccatcatcagtgagcagcaggccaagtctctgcttaaaaatgagaacacccgcaannnnnnnnntggtgagatcctgaacaactgctgcgtgatggagtaccaccaagccacgggcaccctcannnnnnnnnnnnnnnnnnnnnnnnnnnnnnnnnnnnnnnnnnnnnnnnnnnnnnnnnnnnnnnnnnnnnnnnnnnnnnnnnnnnnnnnnnnnnnnnnnnnnnnnnnnnnnnnnnnnnnnnnnnnnnnnnnnnnnnnnnnnnnnnnnnnnnnnnnnnnnnnnnnnnnnnnnnnnnnnnnnnnnnnnnnnnnnnnnnnnnnnnnnnnnnnnnnnnnnnnnnnnnnnnnnnnggcagggtgccatttgccgtgcctgacaaagtgctgtggccgcagctgtgtgaggcgctcaacatgaaattcaaggccgaagtgcagagcaaccggggcctgaccaaggagaacctcgtgttcctggcgcagaaactgttcaacaacagcagcagccacctggaggactacagtggcctgtccgtgtcctggtcccagttcaacagggagaatttaccaggacggaattacactttctggcaatggtttgacggtgtgatggaagtgttaaaaaaacatctcaagcctcattggaatgatggggccattttggggtttgtaaacaagcaacaggcccatgacctactcattaacaagccagatgggaccttcctcctgagattcagtgactcagaaattggcggcatcaccattgcttggaagtttgattctcaggaaagaatgttttggaatctgatgccttttaccaccagagacttctccattcggtccctagccgaccgcttgggagacttgaattaccttatctacgtgtttcctgatcggccaaaagatgaagtatactccaaatactacacaccagttccctgcgagtctgctactgctaaagctgttgatggatacgtgaagccacagatcaagcaagtggtccctgagtttgtgaacgcatctgcagatgccgggggcggcagcgccacgtacatggaccaggccccctccccagctgtgtgtccccaggctcactataacatgtacccacagaaccctgactcagtccttgacaccgatggggacttcgatctggaggacacaatggacgtagcgcggcgtgtggaggagctcctgggccggccaatggacagtcagtggatcccgcacgcacaatcgtgaccccgcgacctctccatcttcagcttcttcatcttcaccagaggaatcactcttgtggatgttttaattccatgaatcgcttctcttttgaaacaatactcataatgtgaagtgttaatactagttgtgaccttagtgtttctgtgcatggtggcaccagcgaagggagtgcgagtatgtgtttgtgtgtgtgtgtgtgtgtgtgtgtgtgtgcgtgtttgcacgttatggtgtttctccctctcactgtctgagagtttagttgtagcaga

SEQ ID NO: 14236 - protein, 510 aa, Homo sapiens
  misc_feature (1)..(510): Xaa=Unknown amino acid
MAVWIQAQQLQGEALHQMQALYGQHFPIEVRHYLSQWIESQAWDSVDLDNPQENIKATQLLEGLVQELQKKAEHQVGEDGFLLKIKLGHYATQLQNTYDRCPMELVRCIRHILYNEQRLVREANNGSSPAGSLADAMSQKHLQINQTFEELRLVTQDTENELKKLQQTQEYFIIQYQESLRIQAQFGPLAQLSPQERLSRETALQQKQVSLEAWLQREAQTLQQYRVELAEKHQKTLQLLRKQQTIILDDELIQWKRRQQLAGNGGPPEGSLDVLQSWCEKLAEIIWQNRQQIRRAEHLCQQLPIPGPVEEMLAEVNATITDIISALVTSTFIIEKQPPQVLKTQTKFAATVRLLVGGKLNVHMNPPQVKATIISEQQAKSLLKNENTRXXXXGEILNNCCVMEYHQATGTLXXXXXXXXXXXXXXXXXXXXXXXXXXXXXXXXXXXXXXXXXXXXXXXXXXXXXXXXXXXXXXXXXXXXXXXXXXXXXAGCHLPCLTKCCGRSCVRRST

SEQ ID NO: 14237 - DNA, 663 bp, Rattus norvegicus
  ref <308>: DATABASE ACCESSION NUMBER: EMBL / Y08140
  ref <309>: DATABASE ENTRY DATE: 1999-01-08
ctctccaacatgaacctcgtgggcagctacgcacaccatcaccaccatcaccactcacacccgccgcaccccatgctgcacgaacccttcctctttggtccggcctcgcgttgccaccaggagcgcccttacttccagagctggctgctgagcccggctgatgctgccccagatttccctgccggcgggccaccacctaccaccgcagtagcagcggctgcctatggtcccgatgccaggccgagtcagagcccaggtcggctggaggctcttggaggccgcctgcccaggcgaaaaggttcaggacccaaaaaggagcggaggcgcacagagagcattaacagtgcgttcgcggagctgcgtgagtgcatccccaatgtgcctgcggacaccaagctctccaagatcaagactctgcgcctggccaccagctacatcgcctacttgatggacgtgctggccaaggatgcacaagcaggtgaccccgaggccttcaaggctgaactaaaaaagacggatggcggtcgcgaaagcaagcggaaaagggagtcgcctcagcagcacgaaggccttcctcctgccctggggccaagcgagaagaggattaaaggacgcactggctggcctcagcaagtctgggcgctggagctaaaccagtgagac

SEQ ID NO: 14238 - protein, 216 aa, Rattus norvegicus
  ref <308>: DATABASE ACCESSION NUMBER: SWISS-Prot / CAA69334
  ref <309>: DATABASE ENTRY DATE: 2001-10-16
MNLVGSYAHHHHHHHSHPPHPMLHEPFLFGPASRCHQERPYFQSWLLSPADAAPDFPAGGPPPTTAVAAAAYGPDARPSQSPGRLEALGGRLPRRKGSGPKKERRRTESINSAFAELRECIPNVPADTKLSKIKTLRLATSYIAYLMDVLAKDAQAGDPEAFKAELKKTDGGRESKRKRESPQQHEGLPPALGPSEKRIKGRTGWPQQVWALELNQ

SEQ ID NO: 14239 - DNA, 1750 bp, Homo sapiens
  ref <308>: DATABASE ACCESSION NUMBER: Refseq / NM_004821
  ref <309>: DATABASE ENTRY DATE: 2001-02-03
gcggtcttatataagccagatccgcaggggagtccgcagaagggttaaacaggtctttgggcttcggcgacctcgcccgcggcagaaaccggtaagaagacagtgggctgcgcgtctcattttcagccttgcccggactctcccaaagccggcgcccagtagtggctccagagcccacaggtggcccccggcagtctctggggcgcatggagcggcgttaatagggctggcggcgcaggccagtagccgctccaacatgaacctcgtgggcagctacgcacaccatcaccaccatcaccacccgcaccctgcgcaccccatgctccacgaacccttcctcttcggtccggcctcgcgctgtcatcaggaaaggccctacttccagagctggctgctgagcccggctgacgctgccccggacttccctgcgggcgggccgccgcccgcggccgctgcagccgccaccgcctatggtcctgacgccaggcctgggcagagccccgggcggctggaggcgcttggcggccgtcttggccggcggaaaggctcaggacccaagaaggagcggagacgcactgagagcattaacagcgcattcgcggagttgcgcgagtgcatccccaacgtgccggccgacaccaagctctccaagatcaagactctgcgcctagccaccagctacatcgcctacctgatggacgtgctggccaaggatgcacagtctggcgatcccgaggccttcaaggctgaactcaagaaggcggatggcggccgtgagagcaagcggaaaagggagctgcagcagcacgaaggttttcctcctgccctgggcccagtcgagaagaggattaaaggacgcaccggctggccgcagcaagtctgggcgctggagttaaaccagtgagccgaggcccgcgccgaggacctggccaggccagccactcctgaagccccgggaggagaggaaggcagcggcgaacgccaggctctgggctccggcgactggtgctacgcatcccgcggagcttctgctgagcgccggcaggtcgtcggctgcaaccacacacttggatcgcacgtgcaatgtcctttgattttttttaatacattaagagaaagagaaatatatatatatccacccccagcccaaccgagggcggcccttggcggcaacatgcaagaaggagggactgtcgaacccaagggctcaaagacgcactcttccacccttttggagcgaatttagaacctcagccctatctccatttccctatctggctctttctctcttgtccctccatatgatccgccccgacgccgtcttctctaattaaaatgcaataaggaatcaattcttttcttgcctgagaaagagaaccagacgcaggaagatgaaaggctgccctttgttcttcgaatcgtggtggttttattttatttttctttttgtcgctgcacttcctgtttagttccaagggaaacactttctctctttctctgtctctctcttttcttccttcttttccttcctttttgtttctatctaaataaaagctttccctgtgttggaaagtttttatgtatttaaactacctaccatgcctgttgtgctcaggtgtttgttcatcctgccatccccaacccttttctacctcaagtctgtgtgaccactcacagcccccctcccttcgccaaagcagtgtctatgctcttgattaataaaacattttctgaaatcaaaaaaaaaaaa

SEQ ID NO: 14240 - protein, 215 aa, Homo sapiens
  ref <308>: DATABASE ACCESSION NUMBER: Refseq / NP_004812
  ref <309>: DATABASE ENTRY DATE: 2001-02-03
MNLVGSYAHHHHHHHPHPAHPMLHEPFLFGPASRCHQERPYFQSWLLSPADAAPDFPAGGPPPAAAAAATAYGPDARPGQSPGRLEALGGRLGRRKGSGPKKERRRTESINSAFAELRECIPNVPADTKLSKIKTLRLATSYIAYLMDVLAKDAQSGDPEAFKAELKKADGGRESKRKRELQQHEGFPPALGPVEKRIKGRTGWPQQVWALELNQ

SEQ ID NO: 14241 - DNA, 2817 bp, Rattus norvegicus
  ref <308>: DATABASE ACCESSION NUMBER: EMBL / Y09365
  ref <309>: DATABASE ENTRY DATE: 1997-01-15
gggcgcggcctggcgggccgggcggcgctgcagcccatggagctcgagaacatcgtagcgaacacggtgctactcaaggcccgggaaggtggtggcgggaatcgtaaaggcaagagcaagaaatggcgccagatgctgcagttcccccacatcagccagtgtgaagagctccggctcagccttgaacgtgactaccacagcctgtgtgagcgtcagcccattgggcgcctgttatttcgtgagttctgcgctacgaggcctgagctgacccgctgtactgccttcctggatggggtggctgagtatgaggtgacccctgatgagaaacggaaggcatgtgggtgtcggctaatgcagaattttctgagccacacgggtcctgacctcatccctgaagttccccggcagctggtgagtaactgtgcccagcggctagagcagggaccctgcaaagacctcttccaggagctgacccggctgacccatgagtacctaagcatggccccttttgccgactacctcgacagcatctacttcaaccgtttcctgcagtggaagtggctggaaaggcagccagtgaccaaaaacacctttaggcagtaccgagtcctgggcaaaggtggctttggggaggtgtgtgcctgccaggtgcgggcaacaggcaagatgtatgcgtgcaaaaaactggaaaagaaacgaataaagaagcggaagggggaggccatggctctcaacgagaagcagatcctggagaaagtgaacagtaggtttgtagtgagcttagcctacgcatatgagaccaaggatgcactgtgcctggtgctgacattgatgaatggaggcgacctcaagttccacatctaccacatgggccaggctggctttcccgaagcacgtgctgtcttctatgctgccgagatctgctgtggtctggaggacttacaccgggaacgcatcgtgtacagggacctaaagccagagaatatccttctggatgaccatggccacattcgaatctccgacctgggcctgactgtgcatgttcctgagggccagaccatcaaaggccgtgtgggcactgtgggctacatggctccagaggtggtgaagaatgagcgctacacattcagtcctgactggtgggcgctaggctgcctcctgtacgagatgattgcgggccagtcgcccttccagcagaggaagaagaagatcaagcgggaggaggtggagcggctggtcaaggaggtggctgaggagtacaccgaccgcttctccccacaggcacgctcactctgttctcagcttcccaacaaggaccctgctgagcgcctggggtgtcgtggaggtggtgcccgtgaggtaaaggagcacccccttttcaagaaactgaatttcaagcggctgggagctggaatgctagaaccaccttttaaacctgacccccaggccatttactgcaaggacgtgctggacattgaacagttctccacagttaaaggtgtggatctggagcccacagaccaagacttctaccagaagtttgccacgggtagtgtgtccatcccctggcagaacgagatggtggagactgagtgcttccaggaactaaatgtctttgggctggatgggtctgttcccccagacctggactggaaggggcagcccactgcaccccccaagaagggattgctacagagactcttcagtagacaagattgctgtgggaactgtagcgacagtgaagaagagctccccacccgcctctagcccccaggccgaggcccccaccggcggctggcggtagcagctactcagtgactgacgttgacagttttgcacagtgctgtttccagttgtccacgccagtcgtggtctgtggaacacagacggaactgtccccagtgtcctccgttcctcagccactggcccagctgagtttgacgaggcctgggccatcttgggacaaaggtgcgtcccttcagctcttctctgtggagctcggggctttatgtgtttatgtatttgtacgaatgtatatagctaccagagcgttattaactccaccctgggtctggcaccccagggcaactagccctggccaggagagccaggagctggcaagaggaaccagtgccaacctccaggctaatggggcccagtccagatgagcaagcagtgtgtgggccaggtcagacctctgaccacagcattgctccggccaccatcagactcaagtgagactcgtgcctgtctgttgtggactgaggccaccatgctccagttgcccaatgctttcattccgtctcagcgtttgtcagagctggagacgggggctttgtgttctccgggcctgggtcacagtgtgactgcaaactgagctgacggggacctatcacaccactgccccagatgggttgctttttgccttccagctcccagagcacattggtccttattctgggtcatatccaggccataagaggggttagaattagccctccaacattccagaatccctcataaaagtagacatgtgcccagcaataatccaaccttcctgtgtgtgcctgcgggaggcgggtgtgagtgtatatcattgtgtgaagagagtagggtaaggctgtgcctaagccccagaccctagccctagcctttcccagactgtgatggctgtcctgatgctagtaaggacagtatgggaccatacggccctggcgtttccatgtttaaagccaatgtgagctgccatgtgtctatgaccaatgtaagctgccatgtgtctgtctgtgtgaatacagtctgagcacaaggctggcc

SEQ ID NO: 14242 - protein, 576 aa, Rattus norvegicus
  ref <308>: DATABASE ACCESSION NUMBER: SWISS-Prot / CAA70542
  ref <309>: DATABASE ENTRY DATE: 2002-06-15
MELENIVANTVLLKAREGGGGNRKGKSKKWRQMLQFPHISQCEELRLSLERDYHSLCERQPIGRLLFREFCATRPELTRCTAFLDGVAEYEVTPDEKRKACGCRLMQNFLSHTGPDLIPEVPRQLVSNCAQRLEQGPCKDLFQELTRLTHEYLSMAPFADYLDSIYFNRFLQWKWLERQPVTKNTFRQYRVLGKGGFGEVCACQVRATGKMYACKKLEKKRIKKRKGEAMALNEKQILEKVNSRFVVSLAYAYETKDALCLVLTLMNGGDLKFHIYHMGQAGFPEARAVFYAAEICCGLEDLHRERIVYRDLKPENILLDDHGHIRISDLGLTVHVPEGQTIKGRVGTVGYMAPEVVKNERYTFSPDWWALGCLLYEMIAGQSPFQQRKKKIKREEVERLVKEVAEEYTDRFSPQARSLCSQLPNKDPAERLGCRGGGAREVKEHPLFKKLNFKRLGAGMLEPPFKPDPQAIYCKDVLDIEQFSTVKGVDLEPTDQDFYQKFATGSVSIPWQNEMVETECFQELNVFGLDGSVPPDLDWKGQPTAPPKKGLLQRLFSRQDCCGNCSDSEEELPTRL

SEQ ID NO: 14243 - DNA, 2852 bp, Homo sapiens
cggcactcgcgcgcgatcccggccggcggcgcggcccggcgggccaggcggcgccacagcccatggagctcgagaacatcgtagcgaacacggtgctactcaaggcccgggaaggtggcggtggaaatcgcaaaggcaaaagcaagaaatggcggcagatgctccagttccctcacatcagccagtgcgaagagctgcggctcagcctcgagcgtgactatcacagcctgtgcgagcggcagcccattgggcgcctgctgttccgagagttctgtgccacgaggccggagctgagccgctgcgtcgccttcctggatggggtggccgagtatgaagtgaccccggatgacaagcggaaggcatgtgggcggcagctaacgcagaattttctgagccacacgggtcctgacctcatccctgaggtcccccggcagctggtgacgaactgcacccagcggctggagcagggtccctgcaaagaccttttccaggaactcacccggctgacccacgagtacctgagcgtggccccttttgccgactacctcgacagcatctacttcaaccgtttcctgcagtggaagtggctggaaaggcagccagtgaccaaaaacaccttcaggcaataccgagtcctgggcaaaggtggctttggggaggtgtgcgcctgccaggtgcgggccacaggtaagatgtatgcctgcaagaagctagagaaaaagcggatcaagaagcggaaaggggaggccatggcgctgaacgagaagcagatcctggagaaagtgaacagtaggtttgtagtgagcttggcctacgcctatgagaccaaggacgcgctgtgcctggtgctgacactgatgaacgggggcgacctcaagttccacatctaccacatgggccaggctggcttccccgaagcgcgggccgtcttctacgccgccgagatctgctgtggcctggaggacctgcaccgggagcgcatcgtgtacagggacctgaagcccgagaacatcttgctggatgaccacggccacatccgcatctctgacctgggactagctgtgcatgtgcccgagggccagaccatcaaagggcgtgtgggcaccgtgggttacatggctccggaggtggtgaagaatgaacggtacacgttcagccctgactggtgggcgctcggctgcctcctgtacgagatgatcgcaggccagtcgcccttccagcagaggaagaagaagatcaagcgggaggaggtggagcggctggtgaaggaggtccccgaggagtattccgagcgcttttccccgcaggcccgctcactttgctcacagctcctctgcaaggaccctgccgaacgcctggggtgtcgtgggggcagtgcccgcgaggtgaaggagcaccccctctttaagaagctgaacttcaagcggctgggagctggcatgctggagccgccgttcaagcctgacccccaggccatttactgcaaggatgttctggacattgaacagttctctacggtcaagggcgtggagctggagcctaccgaccaggacttctaccagaagtttgccacaggcagtgtgcccatcccctggcagaacgagatggtggagaccgagtgcttccaagagctgaatgtctttgggctggatggctcagttcccccagacctggactggaagggccagccacctgcacctcctaaaaagggactgctgcagagactcttcagtcgccaagattgctgtggaaactgcagcgacagcgaggaagagctccccacccgcctctagcccccagcccgaggcccccaccagcagttggcggtagcagctactccgagcgccgtttacagttttgcacagtgatcttccccattgtccactcaagtcgtggcctggggaacacagacggagctgtccccagtgtcctccgtccctcagcccctggcctggctgagtttggcagggcctgggccatccctgggacaaaggtgcgtcccttcagctcttctccgtggagctcggggctttctgtatttatgtatttgtacgaatgtatatagcgaccagagcattcttaattcccgccgcagacctggcgcccctgccttggctcctgggggcagccagccctggctgggagagcgggagctggcagaggagccactgccaaactcaaggctcctctggcccagcttggatggctgagggtggtcacacccctgagccttcagcactgtgctggccaccccggcctctgagtaagactcgtgcctccccctgctgccctgggctcaggctgctaccctctggggcccaaagctgtcccttctcagtgcttgtcagcgctgggtctggggcctctgtatgccctaggcctgtgccaaagtggccagagattgggctgcctgtgatacccatcagcccactgccccggccggcccagataggtctgcctctgccttccagctcccacagcctggtccctgatactgggctctgtcctgcagacacctctttcagaaacgcccaagcccagcccctaggagggggtggggcatccctggtcaaccctcaaacattccggactcccctcataacaatagacacatgtgcccagcaataatccgccccttcctgtgtgcgcctgtggggtgcgtgcgcgcgcgtgtgtacctgtgtgggtgaaggggatagggcgaggctgtgcctgtgccccaggtcccagccctggcccttcccagactgtgatggccatcctggtcccagtgttagggtagcatgggattacagggccctgttttttccatatttaaagccaatttttattactcgttttgtccaacgtaa

SEQ ID NO: 14244 - protein, 576 aa, Homo sapiens
MELENIVANTVLLKAREGGGGNRKGKSKKWRQMLQFPHISQCEELRLSLERDYHSLCERQPIGRLLFREFCATRPELSRCVAFLDGVAEYEVTPDDKRKACGRQLTQNFLSHTGPDLIPEVPRQLVTNCTQRLEQGPCKDLFQELTRLTHEYLSVAPFADYLDSIYFNRFLQWKWLERQPVTKNTFRQYRVLGKGGFGEVCACQVRATGKMYACKKLEKKRIKKRKGEAMALNEKQILEKVNSRFVVSLAYAYETKDALCLVLTLMNGGDLKFHIYHMGQAGFPEARAVFYAAEICCGLEDLHRERIVYRDLKPENILLDDHGHIRISDLGLAVHVPEGQTIKGRVGTVGYMAPEVVKNERYTFSPDWWALGCLLYEMIAGQSPFQQRKKKIKREEVERLVKEVPEEYSERFSPQARSLCSQLLCKDPAERLGCRGGSAREVKEHPLFKKLNFKRLGAGMLEPPFKPDPQAIYCKDVLDIEQFSTVKGVELEPTDQDFYQKFATGSVPIPWQNEMVETECFQELNVFGLDGSVPPDLDWKGQPPAPPKKGLLQRLFSRQDCCGNCSDSEEELPTRL

SEQ ID NO: 14245 - DNA, 822 bp, Rattus norvegicus
  ref <308>: DATABASE ACCESSION NUMBER: EMBL / Y09453
  ref <309>: DATABASE ENTRY DATE: 1997-05-27
aacaaacgccatgtcacagaccaaaacagcgaaggttcgcgtgaccctcttcttcatcctggcgggtggagtgctcgccatggtggccgtggtgaccgaccactgggccgtgctgagtccacacctggagcaccacaatgagacgtgcgtggcagcccacttcggcctttggaggatctgcaccacttgggttgccatgcacaaccaagacaagaactgtgacggcaccataccagcgggggaaaagaattgctcctacttcaggcacttcaacccaggagagagctcggaaatctttgaattcaccactcagaaggagtacagcatctcggcagcggccatcgctatcttcagccttggcttcatcatcataggctccatctgtgcctttctgtccttcgggaataagcgtgattacctgctaaggccggcatccatgttttatgcctttgcagggctctgcctcatcgtgtcggtggaggtcatgaggcagtcggtgaagcgtatgattgacagcgaggacacggtctggattgagtactattattcgtggtctttcgcctgcgcgtgtgccggcttcactttgctcttcctcggtgggctgtttctcctgctgttctccctgcctcggatgccccagaacccctgggaatcctgcatggacactgagtcagagcactagatcaaagcagagtctttcggaggtgaggagggagtctcacatctgccctgacttcttgtctatcgtgtgtctctccctctgagctcctctacaaacagtgcacatggacacaacccagacctgcccaggtcagaggaagc

SEQ ID NO: 14246 - protein, 223 aa, Rattus norvegicus
  ref <308>: DATABASE ACCESSION NUMBER: SWISS-Prot / CAA70602
  ref <309>: DATABASE ENTRY DATE: 2001-10-16
MSQTKTAKVRVTLFFILAGGVLAMVAVVTDHWAVLSPHLEHHNETCVAAHFGLWRICTTWVAMHNQDKNCDGTIPAGEKNCSYFRHFNPGESSEIFEFTTQKEYSISAAAIAIFSLGFIIIGSICAFLSFGNKRDYLLRPASMFYAFAGLCLIVSVEVMRQSVKRMIDSEDTVWIEYYYSWSFACACAGFTLLFLGGLFLLLFSLPRMPQNPWESCMDTESEH

SEQ ID NO: 14247 - DNA, 1258 bp, Homo sapiens
  ref <308>: DATABASE ACCESSION NUMBER: Refseq / NM_000727
  ref <309>: DATABASE ENTRY DATE: 2002-11-05
cggcttgtcacctgccctaggagacgcagccgccggaccctgcccagggcacccacgcctcggcgaccaccatgtcccagaccaaaatgctgaaggtccgcgtgaccctcttctgcatcctggcaggcatcgtgctggccatgacagccgtggtaaccgaccactgggctgtgctgagcccccacatggagcaccacaacactacctgcgaggcggcccacttcggcctctggcggatttgtaccaagcgcatccccatggacgacagcaagacctgcgggcccatcaccctgcccggggagaagaactgttcctacttcaggcattttaaccccggcgagagctcggagatcttcgaattcaccactcagaaggagtacagcatctcggcagccgccatcgccatcttcagccttggcttcatcatcctgggcagcctctgtgtcctcctgtccctcgggaagaagagggactatctgctgcgacccgcgtccatgttctatgcctttgcaggtctctgcatcctcgtctcggtggaggtcatgcggcagtcggtgaagcgcatgattgacagtgaggacaccgtctggatcgagtactattactcctggtcctttgcctgcgcctgtgccgccttcatcctcctctttctcggcggtctcgccctcctgctgttctccctgcctcgaatgccccggaacccatgggagtcctgcatggatgctgagcccgagcactaaccctctgcggccctagcgaccctcaggcttcttccccaggaagcggggtcttggcctggaaccttccagagaggaggcgggagcaattttagccccaccctgctcccatctgcccccctgcaacagctgcaggctgcttcctctctctgagttcctctgggctgcgcaggctcccctgggaatagagcaagacgtgagtcctaacctggccacagttgggggagcagagccagcaggtggacaggtgtttgcaggggcccaacttcccctggagctcagaggggggcccactgtaccagcctctgataagctgcctccagttgtcctttatgaacattgcagggacaacctgtgtttgccagctgggtgttccgtgtaaatagccagcctgtctctttctcggtgataaaacacacgcgctcctggagcccaggcctccccctccttggcttccaggagcctggaagcatttttaactgggtagaatctgactgtggcttgaaataaaaagctctcag

SEQ ID NO: 14248 - protein, 222 aa, Homo sapiens
  ref <308>: DATABASE ACCESSION NUMBER: Refseq / NP_000718
  ref <309>: DATABASE ENTRY DATE: 2002-11-05
MSQTKMLKVRVTLFCILAGIVLAMTAVVTDHWAVLSPHMEHHNTTCEAAHFGLWRICTKRIPMDDSKTCGPITLPGEKNCSYFRHFNPGESSEIFEFTTQKEYSISAAAIAIFSLGFIILGSLCVLLSLGKKRDYLLRPASMFYAFAGLCILVSVEVMRQSVKRMIDSEDTVWIEYYYSWSFACACAAFILLFLGGLALLLFSLPRMPRNPWESCMDAEPEH

SEQ ID NO: 14249 - DNA, 1026 bp, Rattus norvegicus
  ref <308>: DATABASE ACCESSION NUMBER: EMBL / Y12178
  ref <309>: DATABASE ENTRY DATE: 1998-08-04
atgttgatacataattggatcctgactttctctattttccgagagcatccttcaactgtttttcagatttttacaaagtgcatcttggtatcttcatctttccttcttttctataccctcttaccccatggtttgttagaggacttgatgagaagagttggagacagtttagtggaccttatagtgatctgtgaggacagtcaaggacagcatctgtcttcgttttgcttatttgttgccactttgcagagtcctttcagtgcaggtgtaagtggactatgtaaagcgattctgttacccagcaaacaaatacatgtcatgatacagtctgttgatctgtccatcggcattaccaattccctcacaaatgaacagttgtgtggctttggattttttttaaatgttaaaaccaacctccattgttctcgtattccacttatcaccaatttatttctttcagccagacatatgtctcttgatttggaaaacagtgtaggtagttaccatccccgcatgatatggtcagtcacatggcagtggagtaaccaggttccagcgtttggggaaacatctctagggtttggtatgttccaggaaaaaggtcaaagacatcagaactatgaattcccctgtcgttgtattggaacgtgtggccgtggaagtgtacagtgtgcaggtcttatttcattgcccatagccatcgaattcacataccagttgacctcatctcccacgtgcatcgtgagaccttggaggtttccgaacattttcccattgatagcatgcattttattgctttctatgaattccacgttgtctttgtttagtttctcaggagggagatcggggtatgtattgatgttatcatctaagtaccaagattcattcacatcaaaaactagaaacaaaagggaaaactccattttctttttaggattgaatactttcacagatttccgacatacaatcaatgggcctattagcccacttatgagatccttaactcgatccacggttgagtaataa

SEQ ID NO: 14250 - protein, 340 aa, Rattus norvegicus
  ref <308>: DATABASE ACCESSION NUMBER: SWISS-Prot / CAA72878
  ref <309>: DATABASE ENTRY DATE: 1998-11-01
MLIHNWILTFSIFREHPSTVFQIFTKCILVSSSFLLFYTLLPHGLLEDLMRRVGDSLVDLIVICEDSQGQHLSSFCLFVATLQSPFSAGVSGLCKAILLPSKQIHVMIQSVDLSIGITNSLTNEQLCGFGFFLNVKTNLHCSRIPLITNLFLSARHMSLDLENSVGSYHPRMIWSVTWQWSNQVPAFGETSLGFGMFQEKGQRHQNYEFPCRCIGTCGRGSVQCAGLISLPIAIEFTYQLTSSPTCIVRPWRFPNIFPLIACILLLSMNSTLSLFSFSGGRSGYVLMLSSKYQDSFTSKTRNKRENSIFFLGLNTFTDFRHTINGPISPLMRSLTRSTVE

SEQ ID NO: 14251 - DNA, 1414 bp, Rattus norvegicus
  ref <308>: DATABASE ACCESSION NUMBER: EMBL / Y17295
  ref <309>: DATABASE ENTRY DATE: 1998-10-23
gcgcctccttgttcccagcgtcaccactgccgccatgcccggagggctgcttctcggggacgaagcccccaactttgaggccaataccaccatcggccacatccgcttccacgatttcctaggagattcatggggcattctcttttcccacccacgggactttaccccagtgtgcaccacagaacttggcagagctgcaaagctggcgccagagtttgccaagaggaatgttaagttgattgctctttcaatagactctgttgaggaccattttgcctggagcaaggacatcaatgcttacaatggtgcagcacccacagaaaagctaccatttcccatcatcgacgataaggacagggaccttgccatcctgttgggcatgttggatccagcagagaaggatgaaaaaggcatgcccgtgacagcccgtgtggtattcatttttggccctgacaagaaactaaaactgtccatcctctacccagccaccacgggcagaaactttgatgagattctcagagtggttgactccctccagctgacagcatcaaatccagttgccactccagttgactggaagaagggagagagtgtgatggtccttcccaccctccctgaagaggaagccaaacaacttttccctaaaggagtcttcaccaaagagctcccatctggcaagaaatacctccgttatacgccccagccttaagtctgcgggaactggggctgcaactgctcgaccagcactgggacctgaggatgacagctgacagctgcagttccgtagaaagattgtggcgtggtcacagccgaagtcgcgtaggtcgctcgctatactactggctcattaaatggaaatggcaccaaaacattctcgggattctttactctgtgccttcgccagcattctgcccctccatccatcacagcgccctgctgactggctttctttgaaacgaattatgtgttggtgactgcagggtctctgcagggtctgtgatcagcaaggtagtgtcagtgtgggctccatgctagaatgataaacatcttttgtaggtttccaaactgaatcttctgttacccattgtggagaaccataaagtggggagaaactttcaattctgtactttcagtaaataaagcaggggaggtggggggggggggagagttctctataggaaatccatggtgagtttctatcaaagtgggcttccaagaatgtgtggaagacagcacatgtacttcctggagtttccaggtctgctctctagtgatctgtgaatgtgaactcgccttatgaaagacaggcagtgacattgtttgccactaaatgtcctaaaggagtgggttgccatttctaaattctgctgtgtgaggttcaacaataaaatcctgattagaaaaaaaaaaaaaa

SEQ ID NO: 14252 - protein, 225 aa, Rattus norvegicus
  misc_feature (1)..(225): Xaa=Unknown amino acid
MPGGLLLGDEAPNFEANTTIGHIRFHDFLGDSWGILFSHPRDFTPVCTTELGRAAKLAPEFAKRNVKLIALSIDSVEDHFAWSKDINAYNGAAPTEKLPFPIIDDKDRDLAILLGMLDPAEKDEKGMPVTARVVFIFGPDKKLKLSILYPATTGRNFDEILRVVDSLQLTASNPVATPVDWKKGESVMVLPTLPEEEAKQLFPKGVFTKELPSGKKYLRYTPQPX

SEQ ID NO: 14253 - DNA, 1653 bp, Homo sapiens; identical to SEQ ID NO: 486
  ref <308>: DATABASE ACCESSION NUMBER: EMBL / D14662
  ref <309>: DATABASE ENTRY DATE: 2002-05-29

SEQ ID NO: 14254 - protein, 223 aa, Homo sapiens; identical to SEQ ID NO: 487
  ref <308>: DATABASE ACCESSION NUMBER: SWISS-Prot / P30041
  ref <309>: DATABASE ENTRY DATE: 2002-06-15

SEQ ID NO: 14255 - DNA, 1414 bp, Rattus norvegicus; identical to SEQ ID NO: 14251
  ref <308>: DATABASE ACCESSION NUMBER: EMBL / Y17295
  ref <309>: DATABASE ENTRY DATE: 1998-10-23

SEQ ID NO: 14256 - protein, 223 aa, Rattus norvegicus; identical to SEQ ID NO: 485
  ref <308>: DATABASE ACCESSION NUMBER: SWISS-Prot / CAA76732
  ref <309>: DATABASE ENTRY DATE: 2002-06-15

SEQ ID NO: 14257 - DNA, 1653 bp, Homo sapiens; identical to SEQ ID NO: 486
  ref <308>: DATABASE ACCESSION NUMBER: Refseq / NM_004905
  ref <309>: DATABASE ENTRY DATE: 2002-11-05

SEQ ID NO: 14258 - protein, 224 aa, Homo sapiens
  ref <308>: DATABASE ACCESSION NUMBER: Refseq / NP_004896
  ref <309>: DATABASE ENTRY DATE: 2002-11-05
MPGGLLLGDVAPNFEANTTVGRIRFHDFLGDSWGILFSHPRDFTPVCTTELGRAAKLAPEFAKRNVKLIALSIDSVEDHLAWSKDINAYNCEEPTEKLPFPIIDDRNRELAILLGMLDPAEKDEKGMPVTARVVFVFGPDKKLKLSILYPATTGRNFDEILRVVISLQLTAEKRVATPVDWKDGDSVMVLPTIPEEEAKKLFPKGVFTKELPSGKKYLRYTPQP

SEQ ID NO: 14259 - DNA, 822 bp, Rattus norvegicus
  ref <308>: DATABASE ACCESSION NUMBER: EMBL / Z21935
  ref <309>: DATABASE ENTRY DATE: 1997-03-19
ggctgtggaggcaatggcctggtgctgtcggctacggacagcagggcttgccggaaggtagccgtgaagaagattgtgctgagtgacgcacgaagcatgaagcacgcgctccgagagatcaaaatcatccggcgcctggaccacgacaacatcgtcaaagtgtacgaggtactgggacccaagggtagcgatctgcagggcgagctctttaagttcagcgtggcttatattgtccaagagtacatggagactgacctggcatgcctgctagagcagggcacgctgaccgaggagcacgctaagctattcatgtaccagctgctgcgtgggctcaagtacatccactctgccaacgtgttgcacagggacctgaagcccgccaacattttcatcagcacggaggacctcgtgctgaagatcggggatttcgggctggccagaatcgcggaccagcattactcccacaagggttatctgtcggaagggttggtgacaaagtggtaccgctctccacgactgctcctgtccccgaacaactacacgaaagccatcgatatgtgggcagctggctgcatcctagcggagatgctcacggggaaaatgctctttgctggggctcacgagcttgagcagatgcagctcatcctagacaccatccctgtagtgcgggaggaagacaaggaggagctgctcagggtgatgccgtcctttgtcagcagcacttgggaggtgaagaggccactgcgtaagctactcccggatgtcaaccgtgaagccattgactttctggagaagatcctgacgttcagccccatggaccgg

SEQ ID NO: 14260 - protein, 274 aa, Rattus norvegicus
  ref <308>: DATABASE ACCESSION NUMBER: SWISS-Prot / CAA79929
  ref <309>: DATABASE ENTRY DATE: 2000-05-30
GCGGNGLVLSATDSRACRKVAVKKIVLSDARSMKHALREIKIIRRLDHDNIVKVYEVLGPKGSDLQGELFKFSVAYIVQEYMETDLACLLEQGTLTEEHAKLFMYQLLRGLKYIHSANVLHRDLKPANIFISTEDLVLKIGDFGLARIADQHYSHKGYLSEGLVTKWYRSPRLLLSPNNYTKAIDMWAAGCILAEMLTGKMLFAGAHELEQMQLILDTIPVVREEDKEELLRVMPSFVSSTWEVKRPLRKLLPDVNREAIDFLEKILTFSPMDR

SEQ ID NO: 14261 - DNA, 1350 bp, Rattus norvegicus
  misc_feature (1)..(1350): n=a, c, g or t
  ref <308>: DATABASE ACCESSION NUMBER: EMBL / Z49748
  ref <309>: DATABASE ENTRY DATE: 1996-04-10
aagcttgtgggtgaccagtactcagggccgggagcaaaggggtgctttcaaccctggctggctctggggaacaagcgcctgtgcctgatctaagtaactggcctccagaccaaggacatgtggagctgtccgaggtgctgaatctgcctactttgggacttagcctagtactgttggagatcggaaagactgggctctccttcggagcctgttctgtcccaggtgaccttgggcacctgacttcccctcatcggcagcgctgaactcattctcggtgtcgcggctggatgggaggctcgtgccaccttcagtctcacagctagtgcgcgtcccttcccgggcgtggagagtgacaaaatcttttgccaggttagatgctcgcctgtccaatctcacctgctcttccccaggccccgacggctccagtcttttggctgcccggcggcaacaggcagcgctctgccccgacagaagcacgttgctagaatccgccccgctgcacaccaggggcctgttgggaccaaaccctcaaaatcaggattaaactgcaggcgggacagcgaaggggcttcaagccatggaagagaggcgtgaaaacacttcggggtccagagtgcgtggttagggcggaggcggggctcatagccaagcttggccgcctggttcctccccagcccgcgaggggcgcctagtccccatgacaacgcggacagcccccaccccaccccccggaggcagcgccggaggctaatcctccctggcgactgtgggcggtgcctcggagctggagtcccgaggcgcgggccatctctcgggaagggtgtaagcatcaagggtgccctacactccaggtggtgacccccncncntcgccgctgggtgaccggccccgggcgggcggtgcgtccccaccacgattggctgcttcctgtgacatcacgctggctcgggaaagtgcagcgtgatccagtcggagccacagcgcccggatagtctagcaaggcagaagacaggggccgtccccttggcaacccatgtccccgccccccccctccaggcccaagtcgcccaccccaccgactcgcggaacctcgtgagcttgttcgccagtctgtccggcaccagcagagaaagacagaagcatgcgggtgagtaactcgcccaagcgcgggggcggggggactcctatgaaagactaaggatgtagngttccgggaccctctgaaggtctccagaggtgggtccggctggaacaggacctttaagaggcaagcgcggtgcagaaggggcggagagcaaggatgggcacccctctggaagaagggcccgggtctctaaaaggtttctccag

SEQ ID NO: 14262 - DNA, 2454 bp, Rattus norvegicus
  ref <308>: DATABASE ACCESSION NUMBER: EMBL / AB012933
  ref <309>: DATABASE ENTRY DATE: 1999-01-25
gacggaggcagctgaatgtggtgctgaaccaacaacatctagctacaaggggagccactcctccacccagcgactgtgactgttctcacaggtctgaatttcctgttggtattcacaaagatgctttttatttttaacttcttgttttccccacttccgaccccggccctgatctgcctcctgacatttggaacggctatcttcctgtggctgatcaacagacctcagccagtcttacctctcattgacttggacaaccagtctgtagggattgagggaggagcacggagaggcgctttccagaagaacaatgacctaatcctttattacttctcagacgccaagacgttgtatgaagttttccaaagaggacttgctgtgtctgacaatggaccttgcttgggatacagaaagccgaaccagccctacaagtggatatcctacaagcaggtgtctgatcgagcagagtacctgggctcctgtcttttgcataaaggatacaagccatcgcaggaccaatttattggcatctttgctcaaaataggccagagtgggtcatctccgagttagcctgttacacatattccatggtagctgtccccctgtatgacacactgggagcagaagccatcatctatgtcatcaacagagctgatatctccgtggtgatctgtgatacaccccaaaaagcaacaatgctgatagaaaatgtggaaaaggaccttaccccaggcctgaagacagtcatcctcatggaccctttcgatgatgacctgatgaaacgaggagagaagtgtggcattgagatgttgtctctgcatgatgctgagaatctaggcaaagagaacttcaaaaaaccaatgcctccgaacccagaggatctaagtgttatctgtttcaccagtggaactacaggtgaccccaaaggagctatgctgacccatcaaaatatcgtttcaaacatggctgctttcctcaaatttctggagcctatcttccagcccacccccgaggatgtgaccatatcctaccttcccttggcccatatgtttgagaggcttgtccagggtgtcatattttcctgtggaggcaaaattgggttcttccaaggagatatccggttgctacctgatgacatgaaggctttgaaacccacagtgtttcccacagtgcctcgactccttaacagggtctatgataaggtacaaaatgaagccaagacacctttgaaaaagttcttattgaacttggctatcatcagcaaattcaacgaagtgagaaatggcatcattcggcggaacagtttgtgggacaagctcgtgttttcaaagatccaaagcagcctgggtgggaaggttcgtctcatgatcactggagccgcccctatctccactccagtcttgacgttcttcagggctgcaatgggatgctgggtgtttgaagcttacggccaaacagaatgcacagctgggtgttccattacatcacctggggactggacagcaggtcatgttgggactccggtgtcctgcaattttgtcaagctggaagatgtggctgacatgaactacttttcagtaaacaacgaaggcgagatctgcatcaaaggcaacaatgtgttcaaaggctacctaaaggacccagagaagacacaggaagtactggacaaggatggctggcttcacactggggacatcggtcgctggcttccaaatggaactctgaaaatcattgaccggaagaagaatattttcaaattggcacaaggagaatacatcgctccagagaagattgaaaatgtttattccaggagcagaccaatattgcaagtttttgtccatggggagagcttacggtcattcctgataggagtggtggttcctgacccagagtcacttccctcatttgcagccaagatcggggtaaagggatcctttgaagaactatgccaaaaccagtgtgtaaagaaagccattttagaagatttgcagaaagttgggaaagaaggtggccttaaatcctttgagcaggtcaagagcatctttgtgcatccggagccgttctcaattgaaaacgggcttctgacaccgacactgaaagccaaacgagtggagcttgccaagttcttccagacacaaatcaagagcctctatgagagcatcgaagagtaacttaaggttgctgagctggaagcggtgggggacgaagcggaaactatgtccagcgaacttttccagtaaatgaagcaatcactaaaggactgtcctgagttgggagcaaagcaacgtggacgagctcgatgtgacgcctgcactgcaggcgtcttctgtgatggaagctctggatctttctccttggacttcagtccctgcagtattttgctgccagatagcatgtggtgcctctacctgtaaatgtcagatctttgaaataaactattacagctcgtgccg

SEQ ID NO: 14263 - protein, 683 aa, Rattus norvegicus
  ref <308>: DATABASE ACCESSION NUMBER: SWISS-Prot / O88813
  ref <309>: DATABASE ENTRY DATE: 2001-10-16
MLFIFNFLFSPLPTPALICLLTFGTAIFLWLINRPQPVLPLIDLDNQSVGIEGGARRGAFQKNNDLILYYFSDAKTLYEVFQRGLAVSDNGPCLGYRKPNQPYKWISYKQVSDRAEYLGSCLLHKGYKPSQDQFIGIFAQNRPEWVISELACYTYSMVAVPLYDTLGAEAIIYVINRADISVVICDTPQKATMLIENVEKDLTPGLKTVILMDPFDDDLMKRGEKCGIEMLSLHDAENLGKENFKKPMPPNPEDLSVICFTSGTTGDPKGAMLTHQNIVSNMAAFLKFLEPIFQPTPEDVTISYLPLAHMFERLVQGVIFSCGGKIGFFQGDIRLLPDDMKALKPTVFPTVPRLLNRVYDKVQNEAKTPLKKFLLNLAIISKFNEVRNGIIRRNSLWDKLVFSKIQSSLGGKVRLMITGAAPISTPVLTFFRAAMGCWVFEAYGQTECTAGCSITSPGDWTAGHVGTPVSCNFVKLEDVADMNYFSVNNEGEICIKGNNVFKGYLKDPEKTQEVLDKDGWLHTGDIGRWLPNGTLKIIDRKKNIFKLAQGEYIAPEKIENVYSRSRPILQVFVHGESLRSFLIGVVVPDPESLPSFAAKIGVKGSFEELCQNQCVKKAILEDLQKVGKEGGLKSFEQVKSIFVHPEPFSIENGLLTPTLKAKRVELAKFFQTQIKSLYESIEE

SEQ ID NO: 14264 - DNA, 3634 bp, Homo sapiens; identical to SEQ ID NO: 6673
  ref <308>: DATABASE ACCESSION NUMBER: EMBL / D10040
  ref <309>: DATABASE ENTRY DATE: 1998-08-17

SEQ ID NO: 14265 - protein, 698 aa, Homo sapiens; identical to SEQ ID NO: 6674
  ref <308>: DATABASE ACCESSION NUMBER: PIR / JX0202
  ref <309>: DATABASE ENTRY DATE: 2002-06-03

SEQ ID NO: 14266 - DNA, 1216 bp, Rattus norvegicus; identical to SEQ ID NO: 12235
  ref <308>: DATABASE ACCESSION NUMBER: EMBL / AF009604
  ref <309>: DATABASE ENTRY DATE: 1998-04-28

SEQ ID NO: 14267 - protein, 291 aa, Rattus norvegicus; identical to SEQ ID NO: 12236
  ref <308>: DATABASE ACCESSION NUMBER: SWISS-Prot / O35180
  ref <309>: DATABASE ENTRY DATE: 2001-10-16

SEQ ID NO: 14268 - DNA, 1500 bp, Homo sapiens; identical to SEQ ID NO: 12237
  ref <308>: DATABASE ACCESSION NUMBER: EMBL / X99664
  ref <309>: DATABASE ENTRY DATE: 1997-05-13

SEQ ID NO: 14269 - protein, 347 aa, Homo sapiens; identical to SEQ ID NO: 12238
  ref <308>: DATABASE ACCESSION NUMBER: SWISS-Prot / Q99963
  ref <309>: DATABASE ENTRY DATE: 2001-10-16

SEQ ID NO: 14270 - DNA, 1611 bp, Rattus norvegicus
  ref <308>: DATABASE ACCESSION NUMBER: EMBL / AF012347
  ref <309>: DATABASE ENTRY DATE: 2000-03-03
tttgaattggtccccactgcttccagaaggaaaggcaagtttgttcctatgacatccccggacagatacttgccgctgacctgcccagggccctgcaagccttgaaaggtctcatcttcttttcccgagcaggagcctgaggtctgcctcctatgcaccccagcacccccatcagctccctcttctccttcaccagccccgcagtgaagaggctgctgggctggaagcagggagatgaagaggagaagtgggcagagaaggcagtggactctttggtgaagaagttaaagaaaaagaaaggcgccatggatgaactggagagggcgctgagctgcccgggccagcctagcaagtgcgttaccattccacgctccctggatggacgcctccaggtgtcccaccggaaggggctgccccatgtcatctactgccgcgtgtggcgctggccagatctgcaatcccatcatgagctgaagcccttggaatgctgcgagttcccgtttggctctaagcagaaggaggtctgcatcaacccataccattaccgcagagtggagaccccagttctgcctccagtgctggtaccaagacacagcgagtacaaccctcagctcagcctcctggccaagttccgaagtgcctcgctgcacagcgaaccgctcatgccgcacaacgccacctaccctgactctttccagcagtctctcggtcccgcaccgccctcctcgccaggacacgtgtttccgcagtctccatgccccaccagctacccgcagtcccccggaagtccttccgagtcagacagtccttatcaacactcagacttccggccagtttgctacgaggagcccctgcactggtgctctgttgcctactacgaactgaacaaccgggtcggagagactttccaggcatcctcccggagtgtgctcatagatggcttcacagacccctccaataacaggaataggttctgtcttgggcttctttcaaatgtaaacagaaattcgacgatagaaaacaccagaaggcacattggaaagggtgtgcatttgtactacgttgggggcgaggtgtacgcggagtgcgtgagcgacagcagcatctttgtccagagccggaactgcaactaccagcacggcttccacccggccactgtctgcaagatccccagtggctgcagcctcaaggtcttcaacaaccagctcttcgcccagctgctcgcccagctgctcgcccagtcagtgcaccacggctttgaagttgtctatgaactgacgaagatgtgcacgattcggatgagctttgtgaagggctggggagccgagtatcatcgccaggatgtcacaagcaccccctgctggattgagattcatcttcatggaccactgcagtggttggacaaggtgctaactcagatgggctccccacacaaccctatttcttcagtgtcttaagtcatgtgctcagctgcatttccacagaatagacgaaggcaggggcttctaccactgcaactcgcagctagtaaaagaccctggacgcagatgtaaacacgtacgatgcacacgattcccatttctatccccattggttctgtgctacctactt

SEQ ID NO: 14271 - protein, 435 aa, Rattus norvegicus
  misc_feature (1)..(435): Xaa=Unknown amino acid
MHPSTPISSLFSFTSPAVKRLLGWKQGDEEEKWAEKAVDSLVKKLKKKKGAMDELERALSCPGQPSKCVTIPRSLDGRLQVSHRKGLPHVIYCRVWRWPDLQSHHELKPLECCEFPFGSKQKEVCINPYHYRRVETPVLPPVLVPRHSEYNPQLSLLAKFRSASLHSEPLMPHNATYPDSFQQSLGPAPPSSPGHVFPQSPCPTSYPQSPGSPSESDSPYQHSDFRPVCYEEPLHWCSVAYYELNNRVGETFQASSRSVLIDGFTDPSNNRNRFCLGLLSNVNRNSTIENTRRHIGKGVHLYYVGGEVYAECVSDSSIFVQSRNCNYQHGFHPATVCKIPSGCSLKVFNNQLFAQLLAQLLAQSVHHGFEVVYELTKMCTIRMSFVKGWGAEYHRQDVTSTPCWIEIHLHGPLQWLDKVLTQMGSPHNPISSVSX

SEQ ID NO: 14272 - DNA, 1380 bp, Homo sapiens
  ref <308>: DATABASE ACCESSION NUMBER: EMBL / D83761
  ref <309>: DATABASE ENTRY DATE: 1997-07-10
ttgccgtgaagggctgtgcggttcccgtgcgcgccggagcctgctgtggcctcttatgcactccaccacccccatcagctccctcttctccttcaccagccccgcagtgaagagactgctaggctggaagcaaggagatgaagaggaaaagtgggcagagaaggcagtggactctctagtgaagaagttaaagaagaagaagggagccatggacgagctggagagggctctcagctgcccggggcagcccagcaaatgcgtcacgattccccgctccctggacgggcggctgcaggtgtcccaccgcaagggcctgccccatgtgatttactgtcgcgtgtggcgctggccggatctgcagtcccaccacgagctgaagccgctggagtgctgtgagttcccatttggctccaagcagaaagaagtgtgcattaacccttaccactaccgccgggtggagactccagtactgcctcctgtgctcgtgccaagacacagtgaatataacccccagctcagcctcctggccaagttccgcagcgcctccctgcacagtgagccactcatgccacacaacgccacctatcctgactctttccagcagcctccgtgctctgcactccctccctcacccagccacgcgttctcccagtccccgtgcacggccagctaccctcactccccaggaagtccttctgagccagagagtccctatcaacactcagactttcgaccagtttgttacgaggagccccagcactggtgctcggtcgcctactatgaactgaacaaccgagttggggagacattccaggcttcctcccgaagtgtgctcatagatgggttcaccgacccttcaaataacaggaacagattctgtcttggacttctttctaatgtaaacagaaactcaacgatagaaaataccaggagacatataggaaagggtgtgcacttgtactacgtcgggggagaggtgtatgccgagtgcgtgagtgacagcagcatctttgtgcagagccggaactgcaactatcaacacggcttccacccagctaccgtctgcaagatccccagcggctgcagcctcaaggtcttcaacaaccagctcttcgctcagctcctggcccagtcagttcaccacggctttgaagtcgtgtatgaactgaccaagatgtgtactatccggatgagttttgttaagggttggggtgctgagtatcatcgccaggatgtcaccagcaccccctgctggattgagattcatcttcatgggccactgcagtggctggacaaagttctgactcagatgggctctccacataaccccatttcttcagtgtcttaacagtcatgtcttaagctgcatttccataggat

SEQ ID NO: 14273 - protein, 431 aa, Homo sapiens
  misc_feature (1)..(431): Xaa=Unknown amino acid
MHSTTPISSLFSFTSPAVKRLLGWKQGDEEEKWAEKAVDSLVKKLKKKKGAMDELERALSCPGQPSKCVTIPRSLDGRLQVSHRKGLPHVIYCRVWRWPDLQSHHELKPLECCEFPFGSKQKEVCINPYHYRRVETPVLPPVLVPRHSEYNPQLSLLAKFRSASLHSEPLMPHNATYPDSFQQPPCSALPPSPSHAFSQSPCTASYPHSPGSPSEPESPYQHSDFRPVCYEEPQHWCSVAYYELNNRVGETFQASSRSVLIDGFTDPSNNRNRFCLGLLSNVNRNSTIENTRRHIGKGVHLYYVGGEVYAECVSDSSIFVQSRNCNYQHGFHPATVCKIPSGCSLKVFNNQLFAQLLAQSVHHGFEVVYELTKMCTIRMSFVKGWGAEYHRQDVTSTPCWIEIHLHGPLQWLDKVLTQMGSPHNPISSVSX

SEQ ID NO: 14274 - DNA, 3909 bp, Rattus norvegicus
  ref <308>: DATABASE ACCESSION NUMBER: EMBL / AF016184
  ref <309>: DATABASE ENTRY DATE: 2000-03-03
cccaggtttaaggctggaaaaaatatgttcattttgatgatagtattctttctcctcaacattccacttctcatggcaaattccgttgatcccaggtgcttttggaaaataaatttgaatgaagtcaaggatatagatttagatacaagttgttacttcatccttgaggcagttcagttgcctatggagaaagattatttcaaccagactctgaatgtcctaaaaacaaccaaatacaacagatatgcattggcattagcctttacaatggatgaaataaacaggaatcctcatattttaccaaacatgtctttgattataaaacatacattgggccactgtgatggaaatatcccactccgcttacttaatcaaatattttatatgccttttcctaattatggctgtaatgaagagactatgtgttcatttatgcttatgggaccgaatttgtggccatctgtagattttttcattcacttgaacatcttatttcctcatttccttcagatttccttcggacctttccattccattttcagtgataatgaacaatttccttatatctatcagatgaccccaaaggatacatcactagcattggcaatggtctctttcatactttacttcaactggaactgggttggtcttgtcctctcagataatgatgaaggcaatcaatttctcacagagttgaaaaaagagacccacaacacggaaatatgctttgcctttgtgaacatgatggcaatcaatgagaattcatccatgaaaaaaactgacatgtactacaaccaaattgtgatgtcaaccgcaaatgttattatcatttatggggaacgacccagtattattgaactgtgtttcagaacatggacatctccagtcatacagaggatatgggttaccaaatcagagttgtatttcccaacaagtaagagagacttaagtcatggaacattctatggaactctagcatttcaacaacaccatgatgtgatttctggatttaaaaattttgtacagacatggtaccatctcaaaagcatggatttatatttattaaagccagagtggggtttctttgaatatgaaacctcagcatcttactgtaaaatactgatgagtaattcatcgaatgtctcattggaatggctaatggaacagaagtttgacatagcctttaatgacaatagtcatagtatatacaatgctgtgtacgccatggcccatgctctccatgaaaagaatctgaaacaaattgataatcaggaaatcagctatggcaaaggagcaagtactcactgcttgaagttacactcatttttgagaacgatccacttcaccaatccttttggggagagagtgattatgaaagagagagtaagagtgcaggaagactatgacattgttcacctgcagaactgctcacaacaccttaggattaaggtgaagatagggcagttcagcccatattttccacatggtggacaatttcacttatatgaagacatgattgatttggccacaggaagtagaaagatgcctttatctatgtgtagtgcagattgtcgtcctggatacagaaaattctggaaggagggaatggcagcctgctgttttgtttgcagtccctgtccagacaatgaaatttctaatgaaacaactgtggtactttgggtctttgtgaagcaccatgacactcctattgtgaaggccaataacagaatcctcagctacatattaatcatgtcactcatgttctgctttctgtgctcctttttcttcattggccatcctaacagaggtacctgtatcttacagcaaatcacatttggaattgtattcactgtggctgtttccacagttctggccaaaacaatcactgtgcttctggcttttcaagtcacagacacaggaagaaagttaagaaacttcctggtatcggggacacccaactacattattcccatatgttccctgttgcaatgcactctgtgtgcaatttggctagcagtttctccaccatttgttgatatcgatgaacattctgagcatggtcacatcataattgtgtgcaacaagggatctgttatggcattctactgtgtcctgggatatttggccttcctggcccttggaagtttcacgatggctttcttggcaaagaatctgcctgacacattcaatgaagccaagttcttgaccttcagcatgctagtgttctgcagtgtctggatcacgttccttcctgtctaccatagcaccaagggcagagtcatggttgctgttgaaattttctccattttgacatccagtgcagggatgcttggatgcgtctttgcacccaaaatttacatcattttaatgaaaccagagagaattctatccaaaagacaggagaaatcacgtttctaaacagatattttagaaattctgtcaaatgtacagttgttatatacccaccaaatatttggttacagtgcataaatctagttttagaactctcactagttcctctaatgatatctagaaatattgtatctaccaatcttacattcattatccataaaatcctgcactcattcacttgtttgttctactctgtgagaaatataattcccaatgtagtattaaattttttctaaaaattttgctttaattgacattttttcccttataacttcaagtacatttgataaggcatttgaatctataaccttttatacaataagatccaggacagacaggattacacatagaaaccgtctatcgaatcaaacaatcaatcagactaaaaaacaaagaatcaacaaagataacatcagaatacattatctgatttccagtagaagcacatatgtgacagaatactgtctgtttttatagttcctcttcaagctattgtattggtcagcagtctaaggtagaagtttttttgtcacaaacacaaaaatattgtatccaacaatggacagaatccagtgagcaccctgttcaaatttggagatagttggaatatcatgaaaaagagggtgacccataagaataccagcattctcaactaacctggacaaccacgaatttgagctgctgaccaggcagcatacataagctgatatgaggctcccagcacagatgcaacatagggctgcctggtctggcctcagtggaagaagacacatttaaaccacaagagacaggagtcacaagggattgggaaggtgtgatggtttgcatatgcttggctcaggaagtggcactattagaaggtgtagacttgatggaggaatttgtcactgtaggggtgggcttggagatccacctcatagctgcctggggatgctcagtctgttcctggcttccttcaggtgaagatatagaactcagatcctccttcaccaagcctgcctggatgctgtgatgctgccatgctccgaccttgatgataatggactgaacctctgaacatgtaagctggctccaattaaaggttgtcctttataaaacttccattgatcacagtgtctgtacatagcaataagacccaaactaagacagaaggtgtgtggattggggaagtggggatttcctcttggaggtggggaagtagtcaaagattaaattgggaaggggataatgagtacaccgtaaaaagtattaaagaataaaatactaaaaaattaattaaataggattgtgaatatattaacatgctattatattatagttctggaagggataggtaaaactcctgatggtggtttgtacctaatttttcttagagcttgccctttgtattcagttgtgattgaaatcctgggctcacaaaattctagtactatggatatggaggcagatactttgattacgctgcttcctagaaataaattttccaaaaaccaaaaa

SEQ ID NO: 14275 - protein, 798 aa, Rattus norvegicus
  misc_feature (1)..(798): Xaa=Unknown amino acid
MFILMIVFFLLNIPLLMANSVDPRCFWKINLNEVKDIDLDTSCYFILEAVQLPMEKDYFNQTLNVLKTTKYNRYALALAFTMDEINRNPHILPNMSLIIKHTLGHCDGNIPLRLLNQIFYMPFPNYGCNEETMCSFMLMGPNLWPSVDFFIHLNILFPHFLQISFGPFHSIFSDNEQFPYIYQMTPKDTSLALAMVSFILYFNWNWVGLVLSDNDEGNQFLTELKKETHNTEICFAFVNMMAINENSSMKKTDMYYNQIVMSTANVIIIYGERPSIIELCFRTWTSPVIQRIWVTKSELYFPTSKRDLSHGTFYGTLAFQQHHDVISGFKNFVQTWYHLKSMDLYLLKPEWGFFEYETSASYCKILMSNSSNVSLEWLMEQKFDIAFNDNSHSIYNAVYAMAHALHEKNLKQIDNQEISYGKGASTHCLKLHSFLRTIHFTNPFGERVIMKERVRVQEDYDIVHLQNCSQHLRIKVKIGQFSPYFPHGGQFHLYEDMIDLATGSRKMPLSMCSADCRPGYRKFWKEGMAACCFVCSPCPDNEISNETTVVLWVFVKHHDTPIVKANNRILSYILIMSLMFCFLCSFFFIGHPNRGTCILQQITFGIVFTVAVSTVLAKTITVLLAFQVTDTGRKLRNFLVSGTPNYIIPICSLLQCTLCAIWLAVSPPFVDIDEHSEHGHIIIVCNKGSVMAFYCVLGYLAFLALGSFTMAFLAKNLPDTFNEAKFLTFSMLVFCSVWITFLPVYHSTKGRVMVAVEIFSILTSSAGMLGCVFAPKIYIILMKPERILSKRQEKSRFX

SEQ ID NO: 14276 - DNA, 5009 bp, Homo sapiens; identical to SEQ ID NO: 8071
  ref <308>: DATABASE ACCESSION NUMBER: EMBL / U20760
  ref <309>: DATABASE ENTRY DATE: 1999-07-02

SEQ ID NO: 14277 - protein, 1078 aa, Homo sapiens; identical to SEQ ID NO: 8072
  ref <308>: DATABASE ACCESSION NUMBER: SWISS-Prot / P41180
  ref <309>: DATABASE ENTRY DATE: 2002-06-15

SEQ ID NO: 14278 - DNA, 1110 bp, Rattus norvegicus; identical to SEQ ID NO: 12255
  ref <308>: DATABASE ACCESSION NUMBER: EMBL / AF029357
  ref <309>: DATABASE ENTRY DATE: 2000-03-03

SEQ ID NO: 14279 - protein, 316 aa, Rattus norvegicus; identical to SEQ ID NO: 12256
  misc_feature (1)..(316): Xaa=Unknown amino acid

SEQ ID NO: 14280 - DNA, 31737 bp, Homo sapiens; identical to SEQ ID NO: 12257
  ref <308>: DATABASE ACCESSION NUMBER: EMBL / AL022727
  ref <309>: DATABASE ENTRY DATE: 2001-09-13

SEQ ID NO: 14281 - DNA, 2381 bp, Rattus norvegicus
  ref <308>: DATABASE ACCESSION NUMBER: EMBL / AF038591
  ref <309>: DATABASE ENTRY DATE: 1999-08-23
gcgaatggcagcctccagaaagccgccgcgagtaagaccacaggatggctccgaaggtgacctcagagcttctgcggcagctgcgacaagctatgaggaactcggagtgcgtggcagaacccatccaggcctacatcatcccatcgggagacgcccaccagagtgagtacattgcaccctgtgactgtcggagggcgttcgtctccggcttcgatggctctgcaggcacagctatcatcacggaggagcatgcggccatgtggacggatgggcgctactttctccaagctgccaagcagatggacaacaactggaccctcatgaagatgggtctgaaggacacaccgactcaggaggactggctggtgagtgtgcttccggaaggatccagggttggtgtggaccctctcatcattcccacagattactggaagaagatggccaaggtacttcgaagtgctggtcaccacctcgtgcctgtgaaggagaaccttgtggataagatctggacagaccggccagagcgcccttgcaagcccctcctcacactgggtctggattatacaggcatctcgtggaaggagaaggttgcagaccttcggttgaaaatggcggagaggagcatcgtgtggtttgtggtcactgccctagacgagattgcatggctgttcaatctccgagggtcagatgtggagcacaacccggtgtttttctcctacgcaatcataggactagagaggatcatgctcttcatcgacggggaccgcattgatgcgcctggtgtgaaacagcacctgctccttgacttgggcctggaggcagaatataaaatccaggtgctgccttacaagtccatcctgagtgaactcaagaccctgtgtgctgacctgtccccgagggagaaggtgtgggtcagtgacaaagccagctatgctgtgagcgaggccatccccaaggatcatcggtgctgtatgccttatacgcccatctgcattgccaaagccgtgaagaactccgccgagtcagcaggcatgaggcgggctcatattaaagatgccgttgccctctgcgagctcttcaactggctggagcaagaggtccccaaaggtggcgtaacggagatctctgcagctgacaaggctgaggaatttcgaagacaacaggctgactttgtggacctgagcttcccaacgatttccagcacgggacccaacggcgccatcattcactacgcgccgatccctgagacgaataggaccctgtccctggatgaggtgtatctcattgactccggtgctcagtacaaggatggaactacagacgttacccggaccatgcacttcgggacccctactgcctatgagaaggagtgtttcacgtatgtactgaaaggccacattgctgtgagcgcggctgttttcccaacgggaaccaaaggccaccttctagactcctttgcccggtcagccctgtgggattccggcctggattacctgcacggaacaggacacggcgtcgggtctttcctgaatgttcacgagggcccttgtggcatcagttataaaacgttctctgacgagcccttggaagccggcatgatcgtcactgatgagccagggtattatgaagatggggcgtttgggatccgcatcgagaacgttgttttggtggtccctgcgaagaccaagtataatttcaataaccgaggaagcctgacctttgaacctctaactttggttcccatccagaccaaaatgatagatgtggatgctcttacagataaagagtgtgactggctcaacagctaccaccagacctgcagggatgtgattgggaaggagctgcagactcaaggccgccaggaagctctcgagtggctcctcagagagacagagcccatctccaggcagcattgataccgtctagcgtttgtttttgtaggatgctctggggaaggaagacacatggcagaccctgacttctttctcctcacctcctcctcctccccaactcccctttttacttttagacactaagaagggcagaaactcttcttatccactttgatattttcttgcaaacagtcttttatgaatttttaattgttgagaatgagccaggaataaaactgctacaccagaaggaggggcctcacaaagcgaagccttgacaagggggagatacccgagccctctggccagcggtggccagcggtgactgctctgcgatggtctccttccaggtgctggtacctcagtcgcggtcaccctgacgttcatgagaccctcctatgatcagtgaataaaatactaaactcggaagagatgagtgcctatggtgtgtacagataaccctctgattttgtgggtttctgagcggcc

SEQ ID NO: 14282 - protein, 624 aa, Rattus norvegicus
  misc_feature (1)..(624): Xaa=Unknown amino acid
MAPKVTSELLRQLRQAMRNSECVAEPIQAYIIPSGDAHQSEYIAPCDCRRAFVSGFDGSAGTAIITEEHAAMWTDGRYFLQAAKQMDNNWTLMKMGLKDTPTQEDWLVSVLPEGSRVGVDPLIIPTDYWKKMAKVLRSAGHHLVPVKENLVDKIWTDRPERPCKPLLTLGLDYTGISWKEKVADLRLKMAERSIVWFVVTALDEIAWLFNLRGSDVEHNPVFFSYAIIGLERIMLFIDGDRIDAPGVKQHLLLDLGLEAEYKIQVLPYKSILSELKTLCADLSPREKVWVSDKASYAVSEAIPKDHRCCMPYTPICIAKAVKNSAESAGMRRAHIKDAVALCELFNWLEQEVPKGGVTEISAADKAEEFRRQQADFVDLSFPTISSTGPNGAIIHYAPIPETNRTLSLDEVYLIDSGAQYKDGTTDVTRTMHFGTPTAYEKECFTYVLKGHIAVSAAVFPTGTKGHLLDSFARSALWDSGLDYLHGTGHGVGSFLNVHEGPCGISYKTFSDEPLEAGMIVTDEPGYYEDGAFGIRIENVVLVVPAKTKYNFNNRGSLTFEPLTLVPIQTKMIDVDALTDKECDWLNSYHQTCRDVIGKELQTQGRQEALEWLLRETEPISRQHX

SEQ ID NO: 14283 - DNA, 1872 bp, Homo sapiens
  ref <308>: DATABASE ACCESSION NUMBER: EMBL / X95762
  ref <309>: DATABASE ENTRY DATE: 1997-11-01
atgcctccaaaggtgacttcagagctgcttcggcagctgagacaagccatgaggaactctgagtatgtgaccgaaccgatccaggcctacatcatcccatcgggagatgctcatcagagtgagtatattgctccatgtgactgtcggcgggcttttgtctctggattcgatggctctgcgggcacagccatcatcacagaagagcatgcagccatgtggactgacgggcgctactttctccaggctgccaagcaaatggacagcaactggacacttatgaagatgggtctgaaggacacaccaactcaggaagactggctggtgagtgtgcttcctgaaggatccagggttggtgtggaccccttgatcattcctacagattattggaagaaaatggccaaagttctgagaagtgccggccatcacctcattcctgtcaaggagaacctcgttgacaaaatctggacagaccgtcctgagcgcccttgcaagcctctcctcacactgggcctggattacacaggcatctcctggaaggacaaggttgcagaccttcggttgaaaatggctgagaggaacgtcatgtggtttgtggtcactgccttggatgagattgcgtggctatttaatctccgaggatcagatgtggagcacaatccagtatttttctcctacgcaatcataggactagagacgatcatgctcttcattgatggtgaccgcatagacgcccccagtgtgaaggagcacctgcttcttgacttgggtctggaagccgaatacaggatccaggtgcatccctacaagtccatcctgagcgagctcaaggccctgtgtgctgacctctccccaagggagaaggtgtgggtcagtgacaaggccagctatgctgtgagcgagaccatccccaaggaccaccgctgctgtatgccttacacccccatctgcatcgccaaagctgtgaagaattcagctgagtcagaaggcatgaggccggctcacattaaagatgctgttgctctctgtgaactctttaactggctggagaaagaggttcccaaaggtggtgtgacagagatctcagctgctgacaaagctgaggagtttcgcaggcaacaggcagactttgtggacctgagcttcccaacaatttccagtacgggacccaacggcgccatcattcactacgcgccagtccctgagacgaataggaccttgtccctggatgaggtgtaccttattgactcgggtgctcaatacaaggatggcaccacagatgtgacgcggacaatgcattttgggacccctacagcctacgagaaggaatgcttcacatatgtcctcaagggccacatagctgtgagtgcagccgttttcccgactggaaccaaaggtcaccttcttgactcctttgcccgttcagctttatgggattcaggcctagattacttgcacgggactggacatggtgttgggtcttttttgaatgtccatgagggtccttgcggcatcagttacaaaacattctctgatgagcccttggaggcaggcatgattgtcactgatgagcccgggtactatgaagatggggcttttggaattcgcattgagaatgttgtccttgtggttcctgtgaagaccaagtataattttaataaccggggaagcctgacctttgaacctctaacattggttccaattcagaccaaaatgatagatgtggattctcttacagacaaagagtgcgactggctcaacaattaccacctgacctgcagggatgtgattgggaaggaattgcagaaacagggccgccaggaagctctcgagtggctcatcagagagacgcaacccatctccaaacagcattaa

SEQ ID NO: 14284 - protein, 624 aa, Homo sapiens
  misc_feature (1)..(624): Xaa=Unknown amino acid
MPPKVTSELLRQLRQAMRNSEYVTEPIQAYIIPSGDAHQSEYIAPCDCRRAFVSGFDGSAGTAIITEEHAAMWTDGRYFLQAAKQMDSNWTLMKMGLKDTPTQEDWLVSVLPEGSRVGVDPLIIPTDYWKKMAKVLRSAGHHLIPVKENLVDKIWTDRPERPCKPLLTLGLDYTGISWKDKVADLRLKMAERNVMWFVVTALDEIAWLFNLRGSDVEHNPVFFSYAIIGLETIMLFIDGDRIDAPSVKEHLLLDLGLEAEYRIQVHPYKSILSELKALCADLSPREKVWVSDKASYAVSETIPKDHRCCMPYTPICIAKAVKNSAESEGMRPAHIKDAVALCELFNWLEKEVPKGGVTEISAADKAEEFRRQQADFVDLSFPTISSTGPNGAIIHYAPVPETNRTLSLDEVYLIDSGAQYKDGTTDVTRTMHFGTPTAYEKECFTYVLKGHIAVSAAVFPTGTKGHLLDSFARSALWDSGLDYLHGTGHGVGSFLNVHEGPCGISYKTFSDEPLEAGMIVTDEPGYYEDGAFGIRIENVVLVVPVKTKYNFNNRGSLTFEPLTLVPIQTKMIDVDSLTDKECDWLNNYHLTCRDVIGKELQKQGRQEALEWLIRETQPISKQHX

SEQ ID NO: 14285 - DNA, 1498 bp, Rattus norvegicus; identical to SEQ ID NO: 12294
  ref <308>: DATABASE ACCESSION NUMBER: EMBL / AF039212
  ref <309>: DATABASE ENTRY DATE: 2000-10-26

SEQ ID NO: 14286 - protein, 531 aa, Rattus norvegicus; identical to SEQ ID NO: 12295
  ref <308>: DATABASE ACCESSION NUMBER: SWISS-Prot / AAB94937
  ref <309>: DATABASE ENTRY DATE: 2003-02-01

SEQ ID NO: 14287 - DNA, 31737 bp, Homo sapiens; identical to SEQ ID NO: 12296
  ref <308>: DATABASE ACCESSION NUMBER: EMBL / AF297093
  ref <309>: DATABASE ENTRY DATE: 2002-02-09

SEQ ID NO: 14288 - protein, 530 aa, Homo sapiens; identical to SEQ ID NO: 12297
  ref <308>: DATABASE ACCESSION NUMBER: SWISS-Prot / AAG30417
  ref <309>: DATABASE ENTRY DATE: 2003-02-01

SEQ ID NO: 14289 - DNA, 5952 bp, Rattus norvegicus; identical to SEQ ID NO: 12298
  ref <308>: DATABASE ACCESSION NUMBER: EMBL / AF039218
  ref <309>: DATABASE ENTRY DATE: 1998-07-07

SEQ ID NO: 14290 - protein, 1619 aa, Rattus norvegicus; identical to SEQ ID NO: 12299
  misc_feature (1)..(1619): Xaa=Unknown amino acid

SEQ ID NO: 14291 - DNA, 31737 bp, Homo sapiens; identical to SEQ ID NO: 12300
  ref <308>: DATABASE ACCESSION NUMBER: EMBL / AC002563
  ref <309>: DATABASE ENTRY DATE: 2000-03-03

SEQ ID NO: 14292 - protein, 1286 aa, Homo sapiens; identical to SEQ ID NO: 12301
  ref <308>: DATABASE ACCESSION NUMBER: SWISS-Prot / O14578
  ref <309>: DATABASE ENTRY DATE: 2002-06-15

SEQ ID NO: 14293 - DNA, 719 bp, Rattus norvegicus
  ref <308>: DATABASE ACCESSION NUMBER: EMBL / AF053990
  ref <309>: DATABASE ENTRY DATE: 1998-04-02
aattggacctgcatggcccgccaggtcactctggcactgggattttgcctttgtctgtcttccattcttggaaagactatttcactcttttttgcctacaggatttcaaaatccaaaacccggcttatatccatgcatcctatttttcgtaaactcattgtgttgatctgtgttgtaggggagattggtgtatgcacagcttacttgatgttgaagcctccaaggatggtcaagaacattgaacctcagaatgtaaagatcatctttgaatgcaatgaaggttctatagagtttctttgctctatatttgcctttgatgtccttctggctctactgtgtttccttacaacctttgtggctcgcaagctgccagataactattatgaagggaaatgtatcacttttgggatgctggtctttttcattgtctggatctcttttgttcctgcttacttgagcaccaaagggaaattcaaagtggctgtggaaatatttgccattttggcatccagctatggcttgttaggctgcatatttcttcccaagtgtttcattatcttgctaaggccaaagaggaataccgatgaaactgttggtggaagagtccccactgttgacaggagcatccagctggcctcaacctctgtgagcagtgagcttaacaccacagtctccactgttctggatgagtagaactgtgagctccaagtgacatgcaa

SEQ ID NO: 14294 - DNA, 5009 bp, Homo sapiens; identical to SEQ ID NO: 8071
  ref <308>: DATABASE ACCESSION NUMBER: EMBL / U20760
  ref <309>: DATABASE ENTRY DATE: 1999-07-02

SEQ ID NO: 14295 - protein, 1089 aa, Homo sapiens
  misc_feature (1)..(1089): Xaa=Unknown amino acid
MAFYSCCWVLLALTWHTSAYGPDQRAQKKGDIILGGLFPIHFGVAAKDQDLKSRPESVECIRYNFRGFRWLQAMIFAIEEINSSPALLPNLTLGYRIFDTCNTVSKALEATLSFVAQNKIDSLNLDEFCNCSEHIPSTIAVVGATGSGVSTAVANLLGLFYIPQVSYASSSRLLSNKNQFKSFLRTIPNDEHQATAMADIIEYFRWNWVGTIAADDDYGRPGIEKFREEAEERDICIDFSELISQYSDEEEIQHVVEVIQNSTAKVIVVFSSGPDLEPLIKEIVRRNITGKIWLASEAWASSSLIAMPQYFHVVGGTIGFALKAGQIPGFREFLKKVHPRKSVHNGFAKEFWEETFNCHLQEGAKGPLPVDTFLRGHEESGDRFSNSSTAFRPLCTGDENISSVETPYIDYTHLRISYNVYLAVYSIAHALQDIYTCLPGRGLFTNGSCADIKKVEAWQVLKHLRHLNFTNNMGEQVTFDECGDLVGNYSIINWHLSPEDGSIVFKEVGYYNVYAKKGERLFINEEKILWSGFSREPLTFVLSVLQVPFSNCSRDCLAGTRKGIIEGEPTCCFECVECPDGEYSDETDASACNKCPDDFWSNENHTSCIAKEIEFLSWTEPFGIALTLFAVLGIFLTAFVLGVFIKFRNTPIVKATNRELSYLLLFSLLCCFSSSLFFIGEPQDWTCRLRQPAFGISFVLCISCILVKTNRVLLVFEAKIPTSFHRKWWGLNLQFLLVFLCTFMQIVICVIWLYTAPPSSYRNQELEDEIIFITCHEGSLMALGFLIGYTCLLAAICFFFAFKSRKLPENFNEAKFITFSMLIFFIVWISFIPAYASTYGKFVSAVEVIAILAASFGLLACIFFNKIYIILFKPSRNTIEEVRCSTAAHAFKVAARATLRRSNVSRKRSSSLGGSTGSTPSSSISSKSNSEDPFPRPERQKQQQPLALTQQEQQQQPLTLPQQQRSQQQPRCKQKVIFGSGTVTFSLSFDEPQKNAMAHRNSTHQNSLEAQKSSDTLTRHQPLLPLQCGETDLDLTVQETGLQGPVGGDQRPEVEDPEELSPALVVSSSQSFVISGGGSTVTENVVNSX

SEQ ID NO: 14296 - DNA, 1733 bp, Rattus norvegicus
  ref <308>: DATABASE ACCESSION NUMBER: Refseq / NM_021593
  ref <309>: DATABASE ENTRY DATE: 2002-11-05
ccacgcgtccgagctcctacctgagcagaggtattctggcagcaatggcatcgtcggacactgaaggaaaaagagtggttgttatcggtggtggtttggttggagcattgaacgcgtgctttctcgcaaagaggaatttccaagttgatgtgtacgaagctagggaagatattcgagtggctaactttatgcgtggaagaagcattaatttggccctttcttatagaggacggcaggccttgaaggccgttggtctggaagatcagatcgtgtccaaaggtgtgcccatgaaagccagaatgatccactctctctcgggaaagaagtctgcaattccctatgggaacaagtcacagtatatcctttcaataagcagagaaaagttaaacaaggatctgctgactgccgtggagtcctaccccaatgcaaaggtgcactttggccacaagctgtcaaaatgctgtccggaggaagggatactcacgatgcttggacccaacaaagttcccagagacatcacgtgtgacctcattgtaggatgtgatggggcctactcaactgtcagagctcacctcatgaagaagccccgttttgattacagtcagcaatatatccctcatggctatatggagctgacaattccacctaagaacggggagtatgccatggaacctaactgtcttcacatttggcctagaaatgcctttatgatgatcgccctaccgaacatggacaaatctttcacatgcaccttgttcatgtcctttgaggagtttgaaaagcttccaacgcatagtgatgtgctggacttcttccagaagaactttccagatgccatccctctgatgggcgagcaagccctcatgagagatttctttctgttgcctgcccagcccatgatatcagtaaagtgctctcccttccacctgaagtcacgctgtgtgctgatgggagatgcagctcatgccatcgtcccattttttgggcaaggaatgaatgcgggctttgaagactgcttggtatttgatgagttaatggacaaattcaataatgatcttagtgtgtgccttcctgaattctcaagatttaggattcctgatgaccatgcaatttcagacctgtctatgtacaattacatagagatgcgagcgcatgtcaactctaggtggttcctgtttcaaaggctcctggataaatttcttcatgcactaatgccatccactttcatccctctctataccatggtcgccttcaccagaataagataccacgaggcagtgctgcgctggcattggcaaaaaaaggtgataaacagaggactctttgtccttgggtccctggtagccattggaagtgcctacatactcgtgcaccacctgtccccgagacctctggaactcctgagatctgcctggacgggaacctctggccactggaataggagtgcagacatttctccacgagttccatggagtcactaggacaaatgccccagttcactatccatagtgtcaacgttccgggtagcaaatgcttgattcctcttcaatatcaagggagaaactcatgttcccattgccgtcttcagttcactatgggaaaatcattgtcagcatataattaagttcggagtggagggctgtttttacagtgtctcattattttgcatgcttggactgggttcaatttttaaatttaaaaacacaataaccaaaaaaaaaaaaaaaaaaaaa

SEQ ID NO: 14297 - protein, 478 aa, Rattus norvegicus
  ref <308>: DATABASE ACCESSION NUMBER: Refseq / NP_067604
  ref <309>: DATABASE ENTRY DATE: 2002-11-05
MASSDTEGKRVVVIGGGLVGALNACFLAKRNFQVDVYEAREDIRVANFMRGRSINLALSYRGRQALKAVGLEDQIVSKGVPMKARMIHSLSGKKSAIPYGNKSQYILSISREKLNKDLLTAVESYPNAKVHFGHKLSKCCPEEGILTMLGPNKVPRDITCDLIVGCDGAYSTVRAHLMKKPRFDYSQQYIPHGYMELTIPPKNGEYAMEPNCLHIWPRNAFMMIALPNMDKSFTCTLFMSFEEFEKLPTHSDVLDFFQKNFPDAIPLMGEQALMRDFFLLPAQPMISVKCSPFHLKSRCVLMGDAAHAIVPFFGQGMNAGFEDCLVFDELMDKFNNDLSVCLPEFSRFRIPDDHAISDLSMYNYIEMRAHVNSRWFLFQRLLDKFLHALMPSTFIPLYTMVAFTRIRYHEAVLRWHWQKKVINRGLFVLGSLVAIGSAYILVHHLSPRPLELLRSAWTGTSGHWNRSADISPRVPWSH

SEQ ID NO: 14298 - DNA, 5000 bp, Homo sapiens
  ref <308>: DATABASE ACCESSION NUMBER: Refseq / NM_003679
  ref <309>: DATABASE ENTRY DATE: 2000-11-01
ggcacgagcagaagcaacaataattgtgaaaaatacttcagcagttatggactcatctgtcattcaaaggaaaaaagtagctgtcattggtggtggcttggttggctcattacaagcatgctttcttgcaaagaggaatttccagattgatgtatatgaagctagggaagatactcgagtggctaccttcacacgtggaagaagcattaacttagccctttctcatagaggacgacaagccttgaaagctgttggcctggaagatcagattgtatcccaaggtattcccatgagagcaagaatgatccactctctttcaggaaaaaagtctgcaattccctatgggacaaagtctcagtatattctttctgtaagcagagaaaatctaaacaaggatctattgactgctgctgagaaataccccaatgtgaaaatgcactttaaccacaggctgttgaaatgtaatccagaggaaggaatgatcacagtgcttggatctgacaaagttcccaaagatgtcacttgtgacctcattgtaggatgtgatggagcctattcaactgtcagatctcacctgatgaagaaacctcgctttgattacagtcagcagtacattcctcatgggtacatggagttgactattccacctaagaacggagattatgccatggaacctaattatctgcatatttggcctagaaatacctttatgatgattgcacttcctaacatgaacaaatcattcacatgtactttgttcatgccctttgaagagtttgaaaaacttctaaccagtaatgatgtggtagatttcttccagaaatactttccggatgccatccctctaattggagagaaactcctagtgcaagatttcttcctgttgcctgcccagcccatgatatctgtaaagtgctcttcatttcactttaaatctcactgtgtactgctgggagatgcagctcatgctatagtgccgttttttgggcaaggaatgaatgcgggctttgaagactgcttggtatttgatgagttaatggataaattcagtaacgaccttagtttgtgtcttcctgtgttctcaagattgagaatcccagatgatcacgcgatttcagacctatccatgtacaattacatagagatgcgagcacatgtcaactcaagctggttcatttttcagaagaacatggagagatttcttcatgcgattatgccatcgacctttatccctctctatacaatggtcactttttccagaataagataccatgaggctgtgcagcgttggcattggcaaaaaaaggtgataaacaaaggactctttttcttgggatcactgatagccatcagcagtacctacctacttatacactacatgtcaccacgatctttcctctgcttgagaagaccatggaactggatagctcacttccggaatacaacatgtttccccgcaaaggccgtggactccctagaacaaatttccaatctcattagcaggtgatagaaaggttttgtggtagcaaatgcatgatttctctgtgaccaaaattaagcatgaaaaaaatgtttccattgccatatttgattcactagtggaagatagtgttctgcttataattaaactgaatgtagagtatctctgtatgttaattgcaattactggttggggggtgcattttaaaagatgaaacatgcagcttccctacattacacacactcaggttgagtcattctaactataaaagtgcaatgactaagatccttcacttctctgaaagtaaggccctagatgcctcagggaagacagtaatcatgccttttctttaaaagacacaataggactcgcaacagcattgactcaacacctaggactaaaaatcacaacttaactagcatgttaactgcacttttcattacgtgaatggaacttacctaaccacagggctcagacttactagataaaaccagaaatggaaataaggaattcaggggagttccagagacttacaaaatgaactcattttattttcccaccttcaaatataagtattatcatctatctgtttatcgtctatctatctatcatctatctatctatctatcatctatctatctatctatctatctatctatctatctatctatctatctatctctatttatttatgtatttagagatcaggtctcactctgttgaccaggctggagtgcagtggtgagatctgggttcactgcaacctctgcctcctgggctcaagcaatcctcccacttcagcctcccaaatagctggggctaccatggtatttttcagtagagaccgggtcttgccatgctgcccaggccagtctcaaactcctggcctcatgtgatctgcccacctcagcctcccaaagtacagggattagagttgtgagccaccgctgccagcccagagttaccctctaaagataagaaaaaggctattaatatcatactaagtgaaggacaggaaagggttttattcataaattaaatgtctacatgtgccagaatggaaaggaaacaaggggagacaacttttatagaaatacaaagccattactttattcaatttcagaccctcagaagcaatttactaatttattcttcgactacatactgcagcagaaccagcaatacacttgatttttaaaagcacatttagtgaaatgttttctttggttcatccttctttaacaggctgctgagtcactcagaaatccttcaaacatgattaattatgaagatgaaacactagagtcatataagaaataaaaattgggcaataaaataaaatgattcagtgtttcttttctatattgtcaatgaaaaccttgagttctaataatccatgttcagtttgtagggaaagaaaaaataatttttccttctacccactttaggttccttggctggggcccctataacaaaagacagattgacaagagaaaaacaaacataaatttattagcgggtatatgtaatatatatgtgggaaatacaggggaatgagcaaatctcaaagagctggcgtcttagaactccctggcttatatagcatcgacaaagaacagtaaatttttagagaaacaacaaaacaaagaaaaagagctttgagtctgtaggggcagcaatttgggggaagcaaatatatgggagtttgccttgtagattcctctggtggtggtctccaggctgacaaggattcaaagttgtctctgaaactcctctttgtcatactgcacatataaaacgtcttttgtttccaacaagaggatttctttttcattctagaattatctccttgataacttgatcagatataggacatgacactgaatagagtccaacagtacaaaaaaaattcagtatgttctagctacttcacacatgtgtacgcgacagttatttttacagtaaggtattttcgagaaaaatgcattacgtgttttggaaaatagagtaatttaaaaaatatatttgaaatgaaaatctccaacacattagaagatgatgatgttagatgcccatcgtgtgccacaagtggttttttcattatgtaaagcacccgttgaattaaaagaatttgtttttgttcaacctcttcctgaggcccaagagcatatgggcaattcggatttcctgctggaccacaaggttctgttgatattacatagaaacgggtattccagacacttcttatgatgaaagtccaaaagtggcatccaatttaaggccccatctttcgttgccattcttcattcctacaaaggacgaacttggattacatcaactttggacccattggttttgtcgctgtcgtcaactgacagtgattcaccactggtgatgataaaaatgatggaagaagagttgaaagtcacttttttctttggcctgtccccatctttctgtgacatcacaatgggtctgatctgcatttcacttccagctgctggtaggtctttagcaggcctctggcacctcagcagtcggaggcacagaagctgcaaaagggatcttcgaaactgggcagagaaaaaataaagtggaatattaagtaaaagttgggcactaatctggattaacattcgaggaaatcagttgagctgatttaagttgttttttgtttgttagcaggtgtggatgtggggttatgtggtcatgctcagatctacctaaatcaccccagagctttatgtcttttattcattctaaatcttattaaccggaatatgtaggaccatttcaataccttgtaatcctccaagcttcaatctgcacacactttctatgagggcaggtacaactattaagagattttgaacattaagttagtccacaaatattcagtgggcatctactaggtgacagccactgtgctataattagagactttttactataagcatcaaaaacagataaggctcttcctggcagagtttacagcctggtgtacttgctaatgtctctttaattaggtgaagaattttttttttctatcgaaattactaatcagttggggaaaaaaatactatagcagacagcactaatgtcatcaacaaacattgttcttctccgtgtcctgggtacaacatcgaataatatttcttggcctcctttccgcttctcctctctgctgttcctctctacaagaacctgggaggccaacgcctaaagatcataatatcacaatggaaggaacctagattcctaaatgactgcataggacagatcccatctcctccacccaatacattattagactgaactgtgacctgaaatgagcaataaactctgtattaattcactgaaatgttggggttgcttgttatagtagtcggtccatcatgaccagtaaaacataaatcaaaagttaatgtaattgttatcccattatttagagcgaaataaatgttgaatatatggactttctcagattaggaaataccaattaaaaatataataaatagct

SEQ ID NO: 14299 - protein, 486 aa, Homo sapiens
  ref <308>: DATABASE ACCESSION NUMBER: Refseq / NP_003670
  ref <309>: DATABASE ENTRY DATE: 2000-11-01
MDSSVIQRKKVAVIGGGLVGSLQACFLAKRNFQIDVYEAREDTRVATFTRGRSINLALSHRGRQALKAVGLEDQIVSQGIPMRARMIHSLSGKKSAIPYGTKSQYILSVSRENLNKDLLTAAEKYPNVKMHFNHRLLKCNPEEGMITVLGSDKVPKDVTCDLIVGCDGAYSTVRSHLMKKPRFDYSQQYIPHGYMELTIPPKNGDYAMEPNYLHIWPRNTFMMIALPNMNKSFTCTLFMPFEEFEKLLTSNDVVDFFQKYFPDAIPLIGEKLLVQDFFLLPAQPMISVKCSSFHFKSHCVLLGDAAHAIVPFFGQGMNAGFEDCLVFDELMDKFSNDLSLCLPVFSRLRIPDDHAISDLSMYNYIEMRAHVNSSWFIFQKNMERFLHAIMPSTFIPLYTMVTFSRIRYHEAVQRWHWQKKVINKGLFFLGSLIAISSTYLLIHYMSPRSFLCLRRPWNWIAHFRNTTCFPAKAVDSLEQISNLISR

SEQ ID NO: 14300 - DNA, 2465 bp, Rattus norvegicus
  ref <308>: DATABASE ACCESSION NUMBER: EMBL / AF072892
  ref <309>: DATABASE ENTRY DATE: 1999-05-03
gaacttgcaggcgagctgccccgagcctttctgggtgaagaactcaaggcgcgcgggcgcagcagctgcgagcattaggtgctgaggaccggcgccggaaccgggatcagccgcgagctgcgcatcctccctcctctccagctctgtcccgcactcgccgcatccttccccaggccaccgcgcttcctatgtgatctgccggggcaacgcggagcccattctcacagctcagcagtgaatctcccccccaaactgcagtaagccgcctttcaaggacaagatgttgataaatatgaacggcatcctatggatgtgctcaaccttactgttaacgcatgcactgcataaagccaaaatggaagaaaacccacctgttaaaggctctctgtctggaaaagtgatcctaccttgtcatttttcaaccttgcccaccttaccacccgattacaacacgagtgaatttctcagaatcaaatggtctaaaatagaagtggacaaaaatggaaaagacataaaggagactactgtcctggtggcccaagacgggaacatcaagattggtcaggactacaaggggcgggtatcagtgcctacgcatcccgatgacgtaggcgatgcctctctcaccatggtcaaactccgtgctagtgacgcaggtgtctaccgctgtgatgtcatgtatggcattgaagacactcagaacacgatgtcgctggccgtggacggtgtcgtgtttcactacagggcagcgaccagcagatacactctgaacttcgagtctgctcaacaggcttgtttggacatcggggcggtcatagcaaccccagagcagctgttcgctgcctatgaggatggatttgagcagtgtgatgcaggatggctgtctgaccaaactgtcagatatcccatacgggctccccgagagggctgttatggagacatgatggggaaggaaggggtccggacctatggattccgctctccccaggaaacctatgatgtgtattgctatgtggatcatctggacggcgatgtgttccacatcactgctcccagtaaattcaccttcgaggaggccgaagcagagtgtgcaaaccgggatgccaggctggcgactgttggggaacttcacgcagcttggaggaacggctttgaccagtgcgattacggctggctgtcggatgccagcgtgcggcaccctgtgactgtggccagggcccagtgtggaggtggtctacttggggtgagaaccctgtatcgttttgagaaccagacatgcttccctctccctgatagcagatttgatgcctactgctttaaacgacctgatctctgcaaaacaaacccatgcctcaatggaggcacctgctatcctactgagacttcctatgtgtgcacctgtgcacctggctacagtggagaccagtgtgaactggattttgatgaatgtcactctaacccttgtcggaatggagccacctgtgtggacggtctgaatacatttagatgcctctgccttccgagttatgtcggtgcactctgcgaacaagacactgagacatgcgactatggctggcacaaattccaagggcaatgctacaagtactttgctcatcgccgtacatgggatgctgctgaaagggagtgtcgcctgcagggtgcccacctcacaagcatcctttctcatgaggaacaaatgtttgtgaatcgtgtgggccatgattaccagtggattggcctcaatgacaagatgtttgaacatgacttccgctggactgacggcagcgcactgcaatatgagaactggagacccaaccagccagacagcttcttttctgctggagaagactgcgttgtgatcatttggcatgagaatggccagtggaatgacgtcccctgcaactaccacctcacctacacctgcaagaagggaacagttgcttgcggccaaccccctgttgtagaaaatgccaagacctttggaaagatgaaaccacgttatgaaatcaactccttgattagataccactgcaaagatggtttcattcagcgtcaccttccaactatccggtgcctaggaaatgggagatgggcaatgcctaaaataacctgcatgaacccatctgcataccaaaggacttattctaagaaatacttaaaaaattcctcatcagtcaaggacaattctataaatacgtcaaaacatgagcatcgctggagccggaggtggcaggaaacgaggcgctgatcctaaaatggcgaacataagcttcattcatcatttcagccaaagccctgcctttccgtgcctttcctatcacctcaaggagaattagcagttggtttggattttgggactgccgtctggtcatttggggtggctgtattcctaaaatattttcaatgaaacatggaattttgaaaaaaaaaagcgaataaaatgaaagaaaatgagcgaagaagat

SEQ ID NO: 14301 - protein, 656 aa, Rattus norvegicus
  misc_feature (1)..(656): Xaa=Unknown amino acid
MLINMNGILWMCSTLLLTHALHKAKMEENPPVKGSLSGKVILPCHFSTLPTLPPDYNTSEFLRIKWSKIEVDKNGKDIKETTVLVAQDGNIKIGQDYKGRVSVPTHPDDVGDASLTMVKLRASDAGVYRCDVMYGIEDTQNTMSLAVDGVVFHYRAATSRYTLNFESAQQACLDIGAVIATPEQLFAAYEDGFEQCDAGWLSDQTVRYPIRAPREGCYGDMMGKEGVRTYGFRSPQETYDVYCYVDHLDGDVFHITAPSKFTFEEAEAECANRDARLATVGELHAAWRNGFDQCDYGWLSDASVRHPVTVARAQCGGGLLGVRTLYRFENQTCFPLPDSRFDAYCFKRPDLCKTNPCLNGGTCYPTETSYVCTCAPGYSGDQCELDFDECHSNPCRNGATCVDGLNTFRCLCLPSYVGALCEQDTETCDYGWHKFQGQCYKYFAHRRTWDAAERECRLQGAHLTSILSHEEQMFVNRVGHDYQWIGLNDKMFEHDFRWTDGSALQYENWRPNQPDSFFSAGEDCVVIIWHENGQWNDVPCNYHLTYTCKKGTVACGQPPVVENAKTFGKMKPRYEINSLIRYHCKDGFIQRHLPTIRCLGNGRWAMPKITCMNPSAYQRTYSKKYLKNSSSVKDNSINTSKHEHRWSRRWQETRRX

SEQ ID NO: 14302 - DNA, 11185 bp, Homo sapiens
  ref <308>: DATABASE ACCESSION NUMBER: EMBL / U16306
  ref <309>: DATABASE ENTRY DATE: 1999-07-02
gctgccccgagcctttctggggaagaactccaggcgtgcggacgcaacagccgagaacattaggtgttgtggacaggagctgggaccaagatcttcggccagccccgcatcctcccgcatcttccagcaccgtcccgcaccctccgcatccttccccgggccaccacgcttcctatgtgacccgcctgggcaacgccgaacccagtcgcgcagcgctgcagtgaattttccccccaaactgcaataagccgccttccaaggccaagatgttcataaatataaagagcatcttatggatgtgttcaaccttaatagtaacccatgcgctacataaagtcaaagtgggaaaaagcccaccggtgaggggctccctctctggaaaagtcagcctaccttgtcatttttcaacgatgcctactttgccacccagttacaacaccagtgaatttctccgcatcaaatggtctaagattgaagtggacaaaaatggaaaagatttgaaagagactactgtccttgtggcccaaaatggaaatatcaagattggtcaggactacaaagggagagtgtctgtgcccacacatcccgaggctgtgggcgatgcctccctcactgtggtcaagctgctggcaagtgatgcgggtctttaccgctgtgacgtcatgtacgggattgaagacacacaagacacggtgtcactgactgtggatggggttgtgtttcactacagggcggcaaccagcaggtacacactgaattttgaggctgctcagaaggcttgtttggacgttggggcagtcatagcaactccagagcagctctttgctgcctatgaagatggatttgagcagtgtgacgcaggctggctggctgatcagactgtcagatatcccatccgggctcccagagtaggctgttatggagataagatgggaaaggcaggagtcaggacttatggattccgttctccccaggaaacttacgatgtgtattgttatgtggatcatctggatggtgatgtgttccacctcactgtccccagtaaattcaccttcgaggaggctgcaaaagagtgtgaaaaccaggatgccaggctggcaacagtgggggaactccaggcggcatggaggaacggctttgaccagtgcgattacgggtggctgtcggatgccagcgtgcgccaccctgtgactgtggccagggcccagtgtggaggtggtctacttggggtgagaaccctgtatcgttttgagaaccagacaggcttccctccccctgatagcagatttgatgcctactgctttaaacctaaagaggctacaaccatcgatttgagtatcctcgcagaaactgcatcacccagtttatccaaagaaccacaaatggtttctgatagaactacaccaatcatccctttagttgatgaattacctgtcattccaacagagttccctcccgtgggaaatattgtcagttttgaacagaaagccacagtccaacctcaggctatcacagatagtttagccaccaaattacccacacctactggcagtaccaagaagccctgggatatggatgactactcaccttctgcttcaggacctcttggaaagctagacatatcagaaattaaggaagaagtgctccagagtacaactggcgtctctcattatgctacggattcatgggatggtgtcgtggaagataaacaaacacaagaatcggttacacagattgaacaaatagaagtgggtcctttggtaacatctatggaaatcttaaagcacattccttccaaggaattccctgtaactgaaacaccattggtaactgcaagaatgatcctggaatccaaaactgaaaagaaaatggtaagcactgtttctgaattggtaaccacaggtcactatggattcaccttgggagaagaggatgatgaagacagaacacttacagttggatctgatgagagcaccttgatctttgaccaaattcctgaagtcattacggtgtcaaagacttcagaagacaccatccacactcatttagaagacttggagtcagtctcagcatccacaactgtttcccctttaattatgcctgataataatggatcatccatggatgactgggaagagagacaaactagtggtaggataacggaagagtttcttggcaaatatctgtctactacaccttttccatcacagcatcgtacagaaatagaattgtttccttattctggtgataaaatattagtagagggaatttccacagttatttatccttctctacaaacagaaatgacacatagaagagaaagaacagaaacactaataccagagatgagaacagatacttatacagatgaaatacaagaagagatcactaaaagtccatttatgggaaaaacagaagaagaagtcttctctgggatgaaactctctacatctctctcagagccaattcatgttacagagtcttctgtggaaatgaccaagtcttttgatttcccaacattgataacaaagttaagtgcagagccaacagaagtaagagatatggaggaagactttacagcaactccaggtactacaaaatatgatgaaaatattacaacagtgcttttggcccatggtactttaagtgttgaagcagccactgtatcaaaatggtcatgggatgaagataatacaacatccaagcctttagagtctacagaaccttcagcctcttcaaaattgccccctgccttactcacaactgtggggatgaatggaaaggataaagacatcccaagtttcactgaagatggagcagatgaatttactcttattccagatagtactcaaaagcagttagaggaggttactgatgaagacatagcagcccatggaaaattcacaattagatttcagccaactacatcaactggtattgcagaaaagtcaactttgagagattctacaactgaagaaaaagttccacctatcacaagcactgaaggccaagtttatgcaaccatggaaggaagtgctttgggtgaagtagaagatgtggacctctctaagccagtatctactgttccccaatttgcacacacttcagaggtggaaggattagcatttgttagttatagtagcacccaagagcctactacttatgtagactcttcccataccattcctctttctgtaattcccaagacagactggggagtgttagtaccttctgttccatcagaagatgaagttctaggtgaaccctctcaagacatacttgtcattgatcagactcgccttgaagcgactatttctccagaaactatgagaacaacaaaaatcacagagggaacaactcaggaagaattcccttggaaagaacagactgcagagaaaccagttcctgctctcagttctacagcttggactcccaaggaggcagtaacaccactggatgaacaagagggcgatggatcagcatatacagtctctgaagatgaattgttgacaggttctgagagggtcccagttttagaaacaactccagttggaaaaattgatcacagtgtgtcttatccaccaggtgctgtaactgagcacaaagtgaaaacagatgaagtggtaacactaacaccacgcattgggccaaaagtatctttaagtccagggcctgaacaaaaatatgaaacagaaggtagtagtacaacaggatttacatcatctttgagtccttttagtacccacattacccagcttatggaagaaaccactactgagaaaacatccctagaggatattgatttaggctcaggattatttgaaaagcccaaagccacagaactcatagaattttcaacaatcaaagtcacagttccaagtgatattaccactgccttcagttcagtagacagacttcacacaacttcagcattcaagccatcttccgcgatcactaagaaaccacctctcatcgacagggaacctggtgaagaaacaaccagtgacatggtaatcattggagaatcaacatctcatgttcctcccactacccttgaagatattgtagccaaggaaacagaaaccgatattgatagagagtatttcacgacttcaagtcctcctgctacacagccaacaagaccacccactgtggaagacaaagaggcctttggacctcaggcgctttctacgccacagcccccagcaagcacaaaatttcaccctgacattaatgtttatattattgaggtcagagaaaataagacaggtcgaatgagtgatttgagtgtaattggtcatccaatagattcagaatctaaagaagatgaaccttgtagtgaagaaacagatccagtgcatgatctaatggctgaaattttacctgaattccctgacataattgaaatagacctataccacagtgaagaaaatgaagaagaagaagaagagtgtgcaaatgctactgatgtgacaaccaccccatctgtgcagtacataaatgggaagcatctcgttaccactgtgcccaaggacccagaagctgcagaagctaggcgtggccagtttgaaagtgttgcaccttctcagaatttctcggacagctctgaaagtgatactcatccatttgtaatagccaaaacggaattgtctactgctgtgcaacctaatgaatctacagaaacaactgagtctcttgaagttacatggaagcctgagacttaccctgaaacatcagaacatttttcaggtggtgagcctgatgttttccccacagtcccattccatgaggaatttgaaagtggaacagccaaaaaaggggcagaatcagtcacagagagagatactgaagttggtcatcaggcacatgaacatactgaacctgtatctctgtttcctgaagagtcttcaggagagattgccattgaccaagaatctcagaaaatagcctttgcaagggctacagaagtaacatttggtgaagaggtagaaaaaagtacttctgtcacatacactcccactatagttccaagttctgcatcagcatatgtttcagaggaagaagcagttaccctaataggaaatccttggccagatgacctgttgtctaccaaagaaagctgggtagaagcaactcctagacaagttgtagagctctcagggagttcttcgattccaattacagaaggctctggagaagcagaagaagatgaagatacaatgttcaccatggtaactgatttatcacagagaaatactactgatacactcattactttagacactagcaggataatcacagaaagcttttttgaggttcctgcaaccaccatttatccagtttctgaacaaccttctgcaaaagtggtgcctaccaagtttgtaagtgaaacagacacttctgagtggatttccagtaccactgttgaggaaaagaaaaggaaggaggaggagggaactacaggtacggcttctacatttgaggtatattcatctacacagagatcggatcaattaattttaccctttgaattagaaagtccaaatgtagctacatctagtgattcaggtaccaggaaaagttttatgtccttgacaacaccaacacagtctgaaagggaaatgacagattctactcctgtctttacagaaacaaatacattagaaaatttgggggcacagaccactgagcacagcagtatccatcaacctggggttcaggaagggctgaccactctcccacgtagtcctgcctctgtctttatggagcagggctctggagaagctgctgccgacccagaaaccaccactgtttcttcattttcattaaacgtagagtatgcaattcaagccgaaaaggaagtagctggcactttgtctccgcatgtggaaactacattctccactgagccaacaggactggttttgagtacagtaatggacagagtagttgctgaaaatataacccaaacatccagggaaatagtgatttcagagcgattaggagaaccaaattatggggcagaaataaggggcttttccacaggttttcctttggaggaagatttcagtggtgactttagagaatactcaacagtgtctcatcccatagcaaaagaagaaacggtaatgatggaaggctctggagatgcagcatttagggacacccagacttcaccatctacagtacctacttcagttcacatcagtcacatatctgactcagaaggacccagtagcaccatggtcagcacttcagccttcccctgggaagagtttacatcctcagctgagggctcaggtgagcaactggtcacagtcagcagctctgttgttccagtgcttcccagtgctgtgcaaaagttttctggtacagcttcctccattatcgacgaaggattgggagaagtgggtactgtcaatgaaattgatagaagatccaccattttaccaacagcagaagtggaaggtacgaaagctccagtagagaaggaggaagtaaaggtcagtggcacagtttcaacaaactttccccaaactatagagccagccaaattatggtctaggcaagaagtcaaccctgtaagacaagaaattgaaagtgaaacaacatcagaggaacaaattcaagaagaaaagtcatttgaatcccctcaaaactctcctgcaacagaacaaacaatctttgattcacagacatttactgaaactgaactcaaaaccacagattattctgtactaacaacaaagaaaacttacagtgatgataaagaaatgaaggaggaagacacttctttagttaacatgtctactccagatccagatgcaaatggcttggaatcttacacaactctccctgaagctactgaaaagtcacattttttcttagctactgcattagtaactgaatctataccagctgaacatgtagtcacagattcaccaatcaaaaaggaagaaagtacaaaacattttccgaaaggcatgagaccaacaattcaagagtcagatactgagctcttattctctggactgggatcaggagaagaagttttacctactctaccaacagagtcagtgaattttactgaagtggaacaaatcaataacacattatatccccacacttctcaagtggaaagtacctcaagtgacaaaattgaagactttaacagaatggaaaatgtggcaaaagaagttggaccactcgtatctcaaacagacatctttgaaggtagtgggtcagtaaccagcacaacattaatagaaattttaagtgacactggagcagaaggacccacggtggcacctctccctttctccacggacatcggacatcctcaaaatcagactgtcaggtgggcagaagaaatccagactagtagaccacaaaccataactgaacaagactctaacaagaattcttcaacagcagaaattaacgaaacaacaacctcatctactgattttctggctagagcttatggttttgaaatggccaaagaatttgttacatcagcaccaaaaccatctgacttgtattatgaaccttctggagaaggatctggagaagtggatattgttgattcatttcacacttctgcaactactcaggcaaccagacaagaaagcagcaccacatttgtttctgatgggtccctggaaaaacatcctgaggtgccaagcgctaaagctgttactgctgatggattcccaacagtttcagtgatgctgcctcttcattcagagcagaacaaaagctcccctgatccaactagcacactgtcaaatacagtgtcatatgagaggtccacagacggtagtttccaagaccgtttcagggaattcgaggattccaccttaaaacctaacagaaaaaaacccactgaaaatattatcatagacctggacaaagaggacaaggatttaatattgacaattacagagagtaccatccttgaaattctacctgagctgacatcggataaaaatactatcatagatattgatcatactaaacctgtgtatgaagacattcttggaatgcaaacagatatagatacagaggtaccatcagaaccacatgacagtaatgatgaaagtaatgatgacagcactcaagttcaagagatctatgaggcagctgtcaacctttctttaactgaggaaacatttgagggctctgctgatgttctggctagctacactcaggcaacacatgatgaatcaatgacttatgaagatagaagccaactagatcacatgggctttcacttcacaactgggatccctgctcctagcacagaaacagaattagacgttttacttcccacggcaacatccctgccaattcctcgtaagtctgccacagttattccagagattgaaggaataaaagctgaagcaaaagccctggatgacatgtttgaatcaagcactttgtctgatggtcaagctattgcagaccaaagtgaaataataccaacattgggccaatttgaaaggactcaggaggagtatgaagacaaaaaacatgctggtccttcttttcagccagaattctcttcaggagctgaggaggcattagtagaccatactccctatctaagtattgctactacccaccttatggatcagagtgtaacagaggtgcctgatgtgatggaaggatccaatcccccatattacactgatacaacattagcagtttcaacatttgcgaagttgtcttctcagacaccatcatctcccctcactatctactcaggcagtgaagcctctggacacacagagatcccccagcccagtgctctgccaggaatagacgtcggctcatctgtaatgtccccacaggattcttttaaggaaattcatgtaaatattgaagcaactttcaaaccatcaagtgaggaataccttcacataactgagcctccctctttatctcctgacacaaaattagaaccttcagaagatgatggtaaacctgagttattagaagaaatggaagcttctcccacagaacttattgctgtggaaggaactgagattctccaagatttccaaaacaaaaccgatggtcaagtttctggagaagcaatcaagatgtttcccaccattaaaacacctgaggctggaactgttattacaactgccgatgaaattgaattagaaggtgctacacagtggccacactctacttctgcttctgccacctatggggtcgaggcaggtgtggtgccttggctaagtccacagacttctgagaggcccacgctttcttcttctccagaaataaaccctgaaactcaagcagctttaatcagagggcaggattccacgatagcagcatcagaacagcaagtggcagcgagaattcttgattccaatgatcaggcaacagtaaaccctgtggaatttaatactgaggttgcaacaccaccattttcccttctggagacttctaatgaaacagatttcctgattggcattaatgaagagtcagtggaaggcacggcaatctatttaccaggacctgatcgctgcaaaatgaacccgtgccttaacggaggcacctgttatcctactgaaacttcctacgtatgcacctgtgtgccaggatacagcggagaccagtgtgaacttgattttgatgaatgtcactctaatccctgtcgtaatggagccacttgtgttgatggttttaacacattcaggtgcctctgccttccaagttatgttggtgcactttgtgagcaagataccgagacatgtgactatggctggcacaaattccaagggcagtgctacaaatactttgcccatcgacgcacatgggatgcagctgaacgggaatgccgtctgcagggtgcccatctcacaagcatcctgtctcacgaagaacaaatgtttgttaatcgtgtgggccatgattatcagtggataggcctcaatgacaagatgtttgagcatgacttccgttggactgatggcagcacactgcaatacgagaattggagacccaaccagccagacagcttcttttctgctggagaagactgtgttgtaatcatttggcatgagaatggccagtggaatgatgttccctgcaattaccatctcacctatacgtgcaagaaaggaacagttgcttgcggccagccccctgttgtagaaaatgccaagacctttggaaagatgaaacctcgttatgaaatcaactccctgattagataccactgcaaagatggtttcattcaacgtcaccttccaactatccggtgcttaggaaatggaagatgggctatacctaaaattacctgcatgaacccatctgcataccaaaggacttattctatgaaatactttaaaaattcctcatcagcaaaggacaattcaataaatacatccaaacatgatcatcgttggagccggaggtggcaggagtcgaggcgctgatccctaaaatggcgaacatgtgttttcatcatttcagccaaagtcctaacttcctgtgcctttcctatcacctcgagaagtaattatcagttggtttggatttttggaccaccgttcagtcattttgggttgccgtgctcccaaaacattttaaatgaaagtattggcattcaaaaagacagcagacaaaatgaaagaaaatgagagcagaaagtaagcatttccagcctatctaatttctttagttttctatttgcctccagtgcagtccatttcctaatgtataccagcctactgtactatttaaaatgctcaatttcagcaccgatggccatgtaaataagatgatttaatgttgattttaatcctgtatataaaataaaaagtcacaatgagtttgggcatatttaatgatgattatggagccttagaggtctttaatcattggttcggctgcttttatgtagtttaggctggaaatggtttcacttgctctttgactgtcagcaagactgaagatggcttttcctggacagctagaaaacacaaaatcttgtaggtcattgcacctatctcagccataggtgcagtttgcttctacatgatgctaaaggctgcgaatgggatcctgatggaactaaggactccaatgtcgaactcttctttgctgcattcctttttcttcacttacaagaaaggcctgaatggaggacttttctgtaaccagg

SEQ ID NO: 14303 - protein, 3396 aa, Homo sapiens
  ref <308>: DATABASE ACCESSION NUMBER: SWISS-Prot / P13611
  ref <309>: DATABASE ENTRY DATE: 2001-10-16
MFINIKSILWMCSTLIVTHALHKVKVGKSPPVRGSLSGKVSLPCHFSTMPTLPPSYNTSEFLRIKWSKIEVDKNGKDLKETTVLVAQNGNIKIGQDYKGRVSVPTHPEAVGDASLTVVKLLASDAGLYRCDVMYGIEDTQDTVSLTVDGVVFHYRAATSRYTLNFEAAQKACLDVGAVIATPEQLFAAYEDGFEQCDAGWLADQTVRYPIRAPRVGCYGDKMGKAGVRTYGFRSPQETYDVYCYVDHLDGDVFHLTVPSKFTFEEAAKECENQDARLATVGELQAAWRNGFDQCDYGWLSDASVRHPVTVARAQCGGGLLGVRTLYRFENQTGFPPPDSRFDAYCFKPKEATTIDLSILAETASPSLSKEPQMVSDRTTPIIPLVDELPVIPTEFPPVGNIVSFEQKATVQPQAITDSLATKLPTPTGSTKKPWDMDDYSPSASGPLGKLDISEIKEEVLQSTTGVSHYATDSWDGVVEDKQTQESVTQIEQIEVGPLVTSMEILKHIPSKEFPVTETPLVTARMILESKTEKKMVSTVSELVTTGHYGFTLGEEDDEDRTLTVGSDESTLIFDQIPEVITVSKTSEDTIHTHLEDLESVSASTTVSPLIMPDNNGSSMDDWEERQTSGRITEEFLGKYLSTTPFPSQHRTEIELFPYSGDKILVEGISTVIYPSLQTEMTHRRERTETLIPEMRTDTYTDEIQEEITKSPFMGKTEEEVFSGMKLSTSLSEPIHVTESSVEMTKSFDFPTLITKLSAEPTEVRDMEEDFTATPGTTKYDENITTVLLAHGTLSVEAATVSKWSWDEDNTTSKPLESTEPSASSKLPPALLTTVGMNGKDKDIPSFTEDGADEFTLIPDSTQKQLEEVTDEDIAAHGKFTIRFQPTTSTGIAEKSTLRDSTTEEKVPPITSTEGQVYATMEGSALGEVEDVDLSKPVSTVPQFAHTSEVEGLAFVSYSSTQEPTTYVDSSHTIPLSVIPKTDWGVLVPSVPSEDEVLGEPSQDILVIDQTRLEATISPETMRTTKITEGTTQEEFPWKEQTAEKPVPALSSTAWTPKEAVTPLDEQEGDGSAYTVSEDELLTGSERVPVLETTPVGKIDHSVSYPPGAVTEHKVKTDEVVTLTPRIGPKVSLSPGPEQKYETEGSSTTGFTSSLSPFSTHITQLMEETTTEKTSLEDIDLGSGLFEKPKATELIEFSTIKVTVPSDITTAFSSVDRLHTTSAFKPSSAITKKPPLIDREPGEETTSDMVIIGESTSHVPPTTLEDIVAKETETDIDREYFTTSSPPATQPTRPPTVEDKEAFGPQALSTPQPPASTKFHPDINVYIIEVRENKTGRMSDLSVIGHPIDSESKEDEPCSEETDPVHDLMAEILPEFPDIIEIDLYHSEENEEEEEECANATDVTTTPSVQYINGKHLVTTVPKDPEAAEARRGQFESVAPSQNFSDSSESDTHPFVIAKTELSTAVQPNESTETTESLEVTWKPETYPETSEHFSGGEPDVFPTVPFHEEFESGTAKKGAESVTERDTEVGHQAHEHTEPVSLFPEESSGEIAIDQESQKIAFARATEVTFGEEVEKSTSVTYTPTIVPSSASAYVSEEEAVTLIGNPWPDDLLSTKESWVEATPRQVVELSGSSSIPITEGSGEAEEDEDTMFTMVTDLSQRNTTDTLITLDTSRIITESFFEVPATTIYPVSEQPSAKVVPTKFVSETDTSEWISSTTVEEKKRKEEEGTTGTASTFEVYSSTQRSDQLILPFELESPNVATSSDSGTRKSFMSLTTPTQSEREMTDSTPVFTETNTLENLGAQTTEHSSIHQPGVQEGLTTLPRSPASVFMEQGSGEAAADPETTTVSSFSLNVEYAIQAEKEVAGTLSPHVETTFSTEPTGLVLSTVMDRVVAENITQTSREIVISERLGEPNYGAEIRGFSTGFPLEEDFSGDFREYSTVSHPIAKEETVMMEGSGDAAFRDTQTSPSTVPTSVHISHISDSEGPSSTMVSTSAFPWEEFTSSAEGSGEQLVTVSSSVVPVLPSAVQKFSGTASSIIDEGLGEVGTVNEIDRRSTILPTAEVEGTKAPVEKEEVKVSGTVSTNFPQTIEPAKLWSRQEVNPVRQEIESETTSEEQIQEEKSFESPQNSPATEQTIFDSQTFTETELKTTDYSVLTTKKTYSDDKEMKEEDTSLVNMSTPDPDANGLESYTTLPEATEKSHFFLATALVTESIPAEHVVTDSPIKKEESTKHFPKGMRPTIQESDTELLFSGLGSGEEVLPTLPTESVNFTEVEQINNTLYPHTSQVESTSSDKIEDFNRMENVAKEVGPLVSQTDIFEGSGSVTSTTLIEILSDTGAEGPTVAPLPFSTDIGHPQNQTVRWAEEIQTSRPQTITEQDSNKNSSTAEINETTTSSTDFLARAYGFEMAKEFVTSAPKPSDLYYEPSGEGSGEVDIVDSFHTSATTQATRQESSTTFVSDGSLEKHPEVPSAKAVTADGFPTVSVMLPLHSEQNKSSPDPTSTLSNTVSYERSTDGSFQDRFREFEDSTLKPNRKKPTENIIIDLDKEDKDLILTITESTILEILPELTSDKNTIIDIDHTKPVYEDILGMQTDIDTEVPSEPHDSNDESNDDSTQVQEIYEAAVNLSLTEETFEGSADVLASYTQATHDESMTYEDRSQLDHMGFHFTTGIPAPSTETELDVLLPTATSLPIPRKSATVIPEIEGIKAEAKALDDMFESSTLSDGQAIADQSEIIPTLGQFERTQEEYEDKKHAGPSFQPEFSSGAEEALVDHTPYLSIATTHLMDQSVTEVPDVMEGSNPPYYTDTTLAVSTFAKLSSQTPSSPLTIYSGSEASGHTEIPQPSALPGIDVGSSVMSPQDSFKEIHVNIEATFKPSSEEYLHITEPPSLSPDTKLEPSEDDGKPELLEEMEASPTELIAVEGTEILQDFQNKTDGQVSGEAIKMFPTIKTPEAGTVITTADEIELEGATQWPHSTSASATYGVEAGVVPWLSPQTSERPTLSSSPEINPETQAALIRGQDSTIAASEQQVAARILDSNDQATVNPVEFNTEVATPPFSLLETSNETDFLIGINEESVEGTAIYLPGPDRCKMNPCLNGGTCYPTETSYVCTCVPGYSGDQCELDFDECHSNPCRNGATCVDGFNTFRCLCLPSYVGALCEQDTETCDYGWHKFQGQCYKYFAHRRTWDAAERECRLQGAHLTSILSHEEQMFVNRVGHDYQWIGLNDKMFEHDFRWTDGSTLQYENWRPNQPDSFFSAGEDCVVIIWHENGQWNDVPCNYHLTYTCKKGTVACGQPPVVENAKTFGKMKPRYEINSLIRYHCKDGFIQRHLPTIRCLGNGRWAIPKITCMNPSAYQRTYSMKYFKNSSSAKDNSINTSKHDHRWSRRWQESRR

SEQ ID NO: 14304 - DNA, 4715 bp, Rattus norvegicus
  ref <308>: DATABASE ACCESSION NUMBER: Refseq / NM_013149
  ref <309>: DATABASE ENTRY DATE: 2002-11-14
gcaggtggagcgggcagggcgcggggcaccatgagcagcggcgccaacatcacctatgccagccgcaagcggcgcaagccggtgcagaaaacagtaaagcccgtccctgctgaaggaattaagtcaaacccttctaaacgacacagagaccggctgaacacagagttagaccgcctggctagcctgctgcccttcccacaagatgttattaataagctggacaaactctccgttctaaggctcagcgtcagctacctgagggccaagagcttctttgatgttgcattaaaatccaccccggctgacagaagtagaggccaggaccagtgtagagcacaagtcagagactggcaggacttgcaagaaggagagttcttgttacaggcgctgaatggctttgttctggttgtcacggcagatgccttggtcttctatgcgtcttccactatccaagattacctgggctttcagcaatctgatgtcatacatcagagcgtgtatgagcttatccatacagaagaccgagctgagttccagcgccagcttcactgggctctaaacccctcacagtgcacagactctgcacaaggagtagacgagactcatggcctcccacagccagcggtctactacacgccagaccagcttcctccagagaataccgctttcatggagaggtgcttcagatgccggctgaggtgcctgctggataattcatctggtttcctggcaatgaatttccaagggaggttaaagtatcttcatggacagaacaagaaagggaaagacggagcgctactccctccacagttggctttgtttgcaatagctactccacttcagccaccgtccatcctggaaattcgaaccaaaaacttcatcttcaggaccaaacacaaactggacttcacacctattggctgtgatgccaaagggcagcttattctgggctacacagaagtagagctgtgcaacaaaggatcgggatatcagtttatccacgccgctgacatgcttcactgcgcagaatcccacatccgcatgattaagactggagaaagtggcatgacagttttccggcttcttgcaaaacacagtcgatggaggtgggtccagtccaatgcacgcttgatttacagaaatggaagaccagattacatcatcgcaactcagagaccgctaacggatgaagaaggacgcgaacatttacagaagagaagtatgacactgccattcatgtttgccactggagaggctgtactgtacgagatctccagccctttctctcccataatggatcccttgccaatacgcaccaaaagcaacactagtaggaaagactgggctccccagtcaaccccgagtaaggattctttccaccccaattcccttatgagtgccttgatccaacaggacgagtccatctatctctgtcctccttcgagccccgcaccattagacagccattttctcatggactccatgagtgagtgcggcagttggcaaggcagctttgcagtcgcaagcaatgaagctctgctgaaacacgaggaaatcagacacactcaggacgtgaaccttacactctctggaggcccctcggagctcttcccagataataaaaataatgacttgtatagcatcatgagaaacctagggatcgatttcgaagacatcagaagcatgcagaatgaggagttcttccgaaccgactcctccggtgaggttgacttcaaagacatcgacataacagacgaaatcctgacgtacgtgcaggattctctgaacaattcaactctgctgaattcagcttgccagcaacagcctgtgagccagcacctaagctgcatgctgcaggagcgcctgcagctggagcaacaacagcagcttcagcagcagcaccccactcagacactggagccccagcgccagttgtgtcaggtggaggtcccccagcacgagctgggtcagaaaacgaagcacatgcaagtcaatggcatgttcgccagttggaaccctgcccctcccgtgtctttcagctgtcctcagcaggaacgaaagcactatagcctcttctccggcttacaggggactgcacaggagtttccctacaagtcagaggtggacagtatgccttacacacagaactttgctccctgcaaccagtcactgctaccagaacattccaagggtacacagttggacttccctggaagggattttgaacgatccctgcaccctaacgcttctaatttagaagactttgtcagttgtttacaagttcctgaaaaccaaagacacgggataaactcacagtcagccatggtcagtcctcaggcgtactacgctggggccatgtccatgtaccagtgccaggcagggcctcagcacacccctgtggaccagatgcattacagccctgagattccaggctcccaggcgttcctaagcaagtttcagagtccgagcattttaaatgaagcctactcggcagacttgagcagcattggccaccttcagactgctgctcacctccctcgcctggcagaagcccagcctcttcctgatatcacacccagcggattcctgtagctcgaggccaggatgaatttcagttcattcaggaacaggacaccagaactgtgagggttggacttcagtacgctttctccaaaacagatctcaatgctggtgtttggtgaaggagtttaagaccatattgctagttacctataaggtgggatgctctgaggggcacagggagcggccacgtgcattcacagagctccagcacctcggagtgcacagtgcttactgtggagaactcttggattctctgctcagtaacttcagctggaaaaacagtgaagtactctgagctttgaacttgtggattcttgttagtataccaaatacggagttacaggattaatcggttttctatttttaacctctgtttttgtcccagatgttaaaataaatggtttggtgcttttctcaaaagaaaatgttttccttctgcactgttaatataaaagtgcctcacgtttttgtttttgttttttttttctatctacctgtaacacagggtgtgtattttatatgaaatatttttatctcttttgaattaatattctttctacacacagaaagtttctcaaatcccaactttctttttttttaatgaatccaggcatgtttttactgcactactcatcccctttcttcagataaagggcaaaggataaatgaaagttaactatttattgtgtaatatacttgcttctgaacgttagatgttcctctgtgccttatgttgaaaaatttgaagataacatattgccaaaattatttaattactgcgtactattaagagagtagcaattgaattttaacagtgttttctgagaaatgagccctgctggctttccctgagacctccaagatgaaatcagaaggtcaccatagaaaatgctaaagatggctgtgcccattagcctgcagtgaagggaggtggcgcttgttaagctagttagctaaattaagcagagcactcatttcattgtctgaattctctttaaaaaactgtcttgggtctgtaatccttttcgttatattgactttataaattccacttctactagtggaactatagttttctcatattgaggagtgttaagattgaagatgcgtgttgtgcagtattatgactgaaatgaatggtgcattgtgtaaaggtaacgaacaaaataatctataaaatgttttcaggtttcacttaagaatagttcttacctcatatgcatatgttttttcagtgtatcttgttaagaaatcaaataatgaattgaggcttttgagctggcattaagataaagataagtacaattcacttccctccatacagtaagttgtttgtgtgatagaacctttgctaccaagatggctaatctgtcactccgccgaatgtagttctggaattcccaatgtcaacacaatgtaagcaaccaaaccaaacaacagagaaaacctcacatgaagaacttgctccacacggccaggtgacattttctgttgaatatggaaatgaaaaagagggtatagtaattagtctctttggaaactcttaaaaagtacacagcaacaattgtcagtatgctgcataaaaattcaaaatctgatgggttgaaagatgatggatttctttctagtatgttgcaaagaagggacaaggaacgatggtatctatattttgatcacaactctatgagtagggctctgtgtgtagaaggaactgaggtttaacaagattacttgtgtccaagtgatgatagaactttcttggttgctgtgtttcgttttgagacagggtcccactttgaatcgctgactggcccggaactctctgtgtagatgagtcaggctgctcttgaactcacagagctcctcctgcctctgcgccaccatgtccacctattagaaccttattgaggtagcaggtgtggagagttgaggtcatcagtgtctctagtccaagtgtaaggtgttatcagtgtgtagcagggtgggaaggagctcctgacttcgttacctgtgccgtggagtgtgacttagtcaggtgactcatattacaacactcaagctgcacacacatttggagggtaattgcccacagccagactaaagttgaattgtttattgttttttctgcctct

SEQ ID NO: 14305 - protein, 853 aa, Rattus norvegicus
  ref <308>: DATABASE ACCESSION NUMBER: Refseq / NP_037281
  ref <309>: DATABASE ENTRY DATE: 2002-11-14
MSSGANITYASRKRRKPVQKTVKPVPAEGIKSNPSKRHRDRLNTELDRLASLLPFPQDVINKLDKLSVLRLSVSYLRAKSFFDVALKSTPADRSRGQDQCRAQVRDWQDLQEGEFLLQALNGFVLVVTADALVFYASSTIQDYLGFQQSDVIHQSVYELIHTEDRAEFQRQLHWALNPSQCTDSAQGVDETHGLPQPAVYYTPDQLPPENTAFMERCFRCRLRCLLDNSSGFLAMNFQGRLKYLHGQNKKGKDGALLPPQLALFAIATPLQPPSILEIRTKNFIFRTKHKLDFTPIGCDAKGQLILGYTEVELCNKGSGYQFIHAADMLHCAESHIRMIKTGESGMTVFRLLAKHSRWRWVQSNARLIYRNGRPDYIIATQRPLTDEEGREHLQKRSMTLPFMFATGEAVLYEISSPFSPIMDPLPIRTKSNTSRKDWAPQSTPSKDSFHPNSLMSALIQQDESIYLCPPSSPAPLDSHFLMDSMSECGSWQGSFAVASNEALLKHEEIRHTQDVNLTLSGGPSELFPDNKNNDLYSIMRNLGIDFEDIRSMQNEEFFRTDSSGEVDFKDIDITDEILTYVQDSLNNSTLLNSACQQQPVSQHLSCMLQERLQLEQQQQLQQQHPTQTLEPQRQLCQVEVPQHELGQKTKHMQVNGMFASWNPAPPVSFSCPQQERKHYSLFSGLQGTAQEFPYKSEVDSMPYTQNFAPCNQSLLPEHSKGTQLDFPGRDFERSLHPNASNLEDFVSCLQVPENQRHGINSQSAMVSPQAYYAGAMSMYQCQAGPQHTPVDQMHYSPEIPGSQAFLSKFQSPSILNEAYSADLSSIGHLQTAAHLPRLAEAQPLPDITPSGFL

SEQ ID NO: 14306 - DNA, 5496 bp, Homo sapiens
  ref <308>: DATABASE ACCESSION NUMBER: Refseq / NM_001621
  ref <309>: DATABASE ENTRY DATE: 2000-10-31
attcagccggtgcgcgcggcggcgggaggcagtggctggggagtcccgtcgacgctctgttccgagagcgtgccccggaccgccagctcagaacaggggcagccgtgtagccgaacggaagctgggagcagccgggactggtggcccgcgcccgagctccgcaggcgggaagcaccctggatttgggaagtcccgggagcagcgcggcggcacctccctcacccaaggggccgcggcgacggtcacggggcgcggcgccaccgtgagcgacccaggccaggattctaaatagacggcccaggctcctcctccgcccgggccgcctcacctgcgggcattgccgcgccgcctccgccggtgtagacggcacctgcgccgccttgctcgcgggtctccgcccctcgcccaccctcactgcgccaggcccaggcagctcacctgtactggcgcgggctgcggaagcctgcgtgagccgaggcgttgaggcgcggcgcccacgccactgtcccgagaggacgcaggtggagcgggcgcggcttcgcggaacccggcgccggccgccgcagtggtcccagcctacaccgggttccggggacccggccgccagtgcccggggagtagccgccgccgtcggctgggcaccatgaacagcagcagcgccaacatcacctacgccagtcgcaagcggcggaagccggtgcagaaaacagtaaagccaatcccagctgaaggaatcaagtcaaatccttccaagcggcatagagaccgacttaatacagagttggaccgtttggctagcctgctgcctttcccacaagatgttattaataagttggacaaactttcagttcttaggctcagcgtcagttacctgagagccaagagcttctttgatgttgcattaaaatcctcccctactgaaagaaacggaggccaggataactgtagagcagcaaatttcagagaaggcctgaacttacaagaaggagaattcttattacaggctctgaatggctttgtattagttgtcactacagatgctttggtcttttatgcttcttctactatacaagattatctagggtttcagcagtctgatgtcatacatcagagtgtatatgaacttatccataccgaagaccgagctgaatttcagcgtcagctacactgggcattaaatccttctcagtgtacagagtctggacaaggaattgaagaagccactggtctcccccagacagtagtctgttataacccagaccagattcctccagaaaactctcctttaatggagaggtgcttcatatgtcgtctaaggtgtctgctggataattcatctggttttctggcaatgaatttccaagggaagttaaagtatcttcatggacagaaaaagaaagggaaagatggatcaatacttccacctcagttggctttgtttgcgatagctactccacttcagccaccatccatacttgaaatccggaccaaaaattttatctttagaaccaaacacaaactagacttcacacctattggttgtgatgccaaaggaagaattgttttaggatatactgaagcagagctgtgcacgagaggctcaggttatcagtttattcatgcagctgatatgctttattgtgccgagtcccatatccgaatgattaagactggagaaagtggcatgatagttttccggcttcttacaaaaaacaaccgatggacttgggtccagtctaatgcacgcctgctttataaaaatggaagaccagattatatcattgtaactcagagaccactaacagatgaggaaggaacagagcatttacgaaaacgaaatacgaagttgccttttatgtttaccactggagaagctgtgttgtatgaggcaaccaacccttttcctgccataatggatcccttaccactaaggactaaaaatggcactagtggaaaagactctgctaccacatccactctaagcaaggactctctcaatcctagttccctcctggctgccatgatgcaacaagatgagtctatttatctctatcctgcttcaagtacttcaagtactgcaccttttgaaaacaactttttcaacgaatctatgaatgaatgcagaaattggcaagataatactgcaccgatgggaaatgatactatcctgaaacatgagcaaattgaccagcctcaggatgtgaactcatttgctggaggtcacccagggctctttcaagatagtaaaaacagtgacttgtacagcataatgaaaaacctaggcattgattttgaagacatcagacacatgcagaatgaaaaatttttcagaaatgatttttctggtgaggttgacttcagagacattgacttaacggatgaaatcctgacgtatgtccaagattctttaagtaagtctcccttcataccttcagattatcaacagcaacagtccttggctctgaactcaagctgtatggtacaggaacacctacatctagaacagcaacagcaacatcaccaaaagcaagtagtagtggagccacagcaacagctgtgtcagaagatgaagcacatgcaagttaatggcatgtttgaaaattggaactctaaccaattcgtgcctttcaattgtccacagcaagacccacaacaatataatgtctttacagacttacatgggatcagtcaagagttcccctacaaatctgaaatggattctatgccttatacacagaactttatttcctgtaatcagcctgtattaccacaacattccaaatgtacagagctggactaccctatggggagttttgaaccatccccataccccactacttctagtttagaagattttgtcacttgtttacaacttcctgaaaaccaaaagcatggattaaatccacagtcagccataataactcctcagacatgttatgctggggccgtgtcgatgtatcagtgccagccagaacctcagcacacccacgtgggtcagatgcagtacaatccagtactgccaggccaacaggcatttttaaacaagtttcagaatggagttttaaatgaaacatatccagctgaattaaataacataaataacactcagactaccacacatcttcagccacttcatcatccgtcagaagccagaccttttcctgatttgacatccagtggattcctgtaattccaagcccaattttgaccctggtttttggattaaattagtttgtgaaggattatggaaaaataaaactgtcactgttggacgtcagcaagttcacatggaggcattgatgcatgctattcacaattattccaaaccaaattttaatttttgcttttagaaaagggagtttaaaaatggtatcaaaattacatatactacagtcaagatagaaagggtgctgccacggagtggtgaggtaccgtctacatttcacattattctgggcaccacaaaatatacaaaactttatcagggaaactaagattcttttaaattagaaaatattctctatttgaattatttctgtcacagtaaaaataaaatactttgagttttgagctactggattcttattagttccccaaatacaaagttagagaactaaactagtttttcctatcatgttaacctctgcttttatctcagatgttaaaataaatggtttggtgctttttataaaaagataatctcagtgctttcctccttcactgtttcatctaagtgcctcacatttttttctacctataacactctaggatgtatattttatataaagtattctttttcttttttaaattaatatctttctgcacacaaatattatttgtgtttcctaaatccaaccaattttcattaattcaggcatattttaactccactgcttacctactttcttcaggtaaaagggcaaataatgatcgaaaaaataattatttattacataatttagttgtttctagactataaatgttgctatgtgccttatgttgaaaaaatttaaaagtaaaatgtctttccaaattatttcttaattattataaaaatattaagacaatagcacttaaattcctcaacagtgttttcagaagaaataaatataccactctttacctttattgatatctccatgatgatagttgaatgttgcaatgtgaaaaatctgctgttaactgcaaccttgtttattaaattgcaagaagctttatttctagctttttaattaagcaaagcacccatttcaatgtgtataaattgtctttaaaaactgttttagacctataatccttgataatatattgtgttgactttataaatttcgcttcttagaacagtggaaactatgtgtttttctcatatttgaggagtgttaagattgcagatagcaaggtttggtgcaaagtattgtaatgagtgaattgaatggtgcattgtatagatataatgaacaaaattatttgtaagatatttgcagtttttcattttaaaaagtccataccttatatatgcacttaatttgttggggctttacatactttatcaatgtgtctttctaagaaatcaagtaatgaatccaactgcttaaagttggtattaataaaaagacaaccacatagttcgtttaccttcaaactttaggtttttttaatgatatactgatcttcattaccaataggcaaattaatcaccctaccaactttactgtcctaacatggactttcaaaaagaaaaaatgacaccatcttttattctttttttttttttttttttgagagagagtcttactctgccgcccaaactggagtgcagtggcacaatcttggctcactgcaacctctacctcctgggttcaagtgattctcttgcctcagcctcccgagttgctgggattgcgggcatggtggcgtgagcctgtagtcctagctactcgggaggctgaggcaggagaatagcctgaacctgggaatcggaggttgcagggccaagatcgccccactgcactccagcctggcaatagaccgagctccgtctccaaaaaaaaaaatacaatttttatttcttttactttttttagtaagttaatgtatataaaaatggcttcggacaaaatatctctgagttctgtgtattttcagtcaaaactttaaacctgtagaatcaatttaagtgttgaaaaaaatttgtctgaaacatttcataatttgtttccagcatgaggtatctaaggatttagaccagaggtctagattaatactctatttttacatttaaaccttttattataagtcttacataaaccatttttgttactctcttccacatgttactggataaattgtttagtggaaaataggctttttaatcatgaatatgatgacaatcagttatacagttataaaattaaaagtttgaaaagcaatattgtatatttttatctatataaaataactaaaatgtatctaagaataataaaatcacgttaaacc

SEQ ID NO: 14307 - protein, 848 aa, Homo sapiens
  ref <308>: DATABASE ACCESSION NUMBER: Refseq / NP_001612
  ref <309>: DATABASE ENTRY DATE: 2000-10-31
MNSSSANITYASRKRRKPVQKTVKPIPAEGIKSNPSKRHRDRLNTELDRLASLLPFPQDVINKLDKLSVLRLSVSYLRAKSFFDVALKSSPTERNGGQDNCRAANFREGLNLQEGEFLLQALNGFVLVVTTDALVFYASSTIQDYLGFQQSDVIHQSVYELIHTEDRAEFQRQLHWALNPSQCTESGQGIEEATGLPQTVVCYNPDQIPPENSPLMERCFICRLRCLLDNSSGFLAMNFQGKLKYLHGQKKKGKDGSILPPQLALFAIATPLQPPSILEIRTKNFIFRTKHKLDFTPIGCDAKGRIVLGYTEAELCTRGSGYQFIHAADMLYCAESHIRMIKTGESGMIVFRLLTKNNRWTWVQSNARLLYKNGRPDYIIVTQRPLTDEEGTEHLRKRNTKLPFMFTTGEAVLYEATNPFPAIMDPLPLRTKNGTSGKDSATTSTLSKDSLNPSSLLAAMMQQDESIYLYPASSTSSTAPFENNFFNESMNECRNWQDNTAPMGNDTILKHEQIDQPQDVNSFAGGHPGLFQDSKNSDLYSIMKNLGIDFEDIRHMQNEKFFRNDFSGEVDFRDIDLTDEILTYVQDSLSKSPFIPSDYQQQQSLALNSSCMVQEHLHLEQQQQHHQKQVVVEPQQQLCQKMKHMQVNGMFENWNSNQFVPFNCPQQDPQQYNVFTDLHGISQEFPYKSEMDSMPYTQNFISCNQPVLPQHSKCTELDYPMGSFEPSPYPTTSSLEDFVTCLQLPENQKHGLNPQSAIITPQTCYAGAVSMYQCQPEPQHTHVGQMQYNPVLPGQQAFLNKFQNGVLNETYPAELNNINNTQTTTHLQPLHHPSEARPFPDLTSSGFL

SEQ ID NO: 14308 - DNA, 911 bp, Rattus norvegicus
  ref <308>: DATABASE ACCESSION NUMBER: EMBL / D14988
  ref <309>: DATABASE ENTRY DATE: 1999-09-29
ctggaatcctaacagcatctacacaaagctatttataatgccagactatacttggtttgaaggaataccttttcatgcctttgggatttcaaaagaaactttgcaaaatgtttgtaataagtttgtggtgaaagaagaagatttgattttattggcttatcccaagtcaggaacgaactggctgattgaaattgtctgcttgattcagaccaagggagatcccaagtggatccaatctgtgactatctgggatcgctcaccctggatagagactgatgtaggatatgatatattaatcaaaaagaaaggaccacgactcatgacctcccatcttcccatgcatcttttctccaagtctctcttcagttccaaggccaaggtgatctatctcatcagaaatcccagagatgttcttgtttctggttattatttctggggtaattcaactcttgtgaagaagccagactcactgggaacttatgttgaatggttcctcaaaggaaatgttctatatggatcatggtttgagcacatccgtgcctggctgtccatgcgagaatgggacaacttcttgttactgtactatgaagacatgaaaaaggatacaatgggaaccataaagaagatatgtgacttcctggggaaaaaattagagccagatgagctggatttggtcctcaagtatagttccttccaagtcatgaaagaaaatgacatgtccaattatagcctcctgatgaaaaaatcaatttttactggaattggcctcatgaggaaaggcactattggggactggaagaatcacttcactgtatcccaagctgaagcctttgataaagtgtttcaggagaaaatggccggtttccctccagggatgttcccatgggaataaaatttcaaaagttttaaat

SEQ ID NO: 14309 - protein, 285 aa, Rattus norvegicus
  misc_feature (1)..(285): Xaa=Unknown amino acid
MPDYTWFEGIPFHAFGISKETLQNVCNKFVVKEEDLILLAYPKSGTNWLIEIVCLIQTKGDPKWIQSVTIWDRSPWIETDVGYDILIKKKGPRLMTSHLPMHLFSKSLFSSKAKVIYLIRNPRDVLVSGYYFWGNSTLVKKPDSLGTYVEWFLKGNVLYGSWFEHIRAWLSMREWDNFLLLYYEDMKKDTMGTIKKICDFLGKKLEPDELDLVLKYSSFQVMKENDMSNYSLLMKKSIFTGIGLMRKGTIGDWKNHFTVSQAEAFDKVFQEKMAGFPPGMFPWEX

SEQ ID NO: 14310 - DNA, 1064 bp, Homo sapiens
  ref <308>: DATABASE ACCESSION NUMBER: EMBL / X70222
  ref <309>: DATABASE ENTRY DATE: 1993-06-30
gaattcggcacgaggttgaaaccctcacaccacgcaggaagaggtcatcatcatgtcggacgatttcttatggtttgaaggcatagctttccctactatgggtttcagatccgaaaccttaagaaaagtacgtgatgagttcgtgataagggatgaagatgtaataatattgacttaccccaaatcaggaacaaactggttggctgagattctctgcctgatgcactccaagggggatgccaagtggatccaatctgtgcccatctgggagcgatcaccctgggtagagagtgagattgggtatacagcactcagtgaaagcgagagtccacgtttattctcctcccacctccccatccagttattccccaagtctttcttcagttccaaggccaaggtgatttatctcatgagaaatcccagagatgttttggtgtctggttattttttctggaaaaacatgaagtttattaagaaaccaaagtcatgggaagaatattttgaatggttttgtcaaggaactgtgctatatgggtcatggtttgaccacattcatggctggatgcccatgagagaggagaaaaacttcctgttactgagttatgaggagctgaaacaggacacaggaagaaccatagagaagatctgtcaattcctgggaaagacgttagaacccgaagaactgaacttaattctcaagaacagctcctttcagagcatgaaagaaaacaagatgtccaattattccctcctgagtgttgattatgtagtggacaaagcacaacttctgagaaaaggtgtatctggggactggaaaaatcacttcacagtggcccaagctgaagactttgataaattgttccaagagaagatggcagatcttcctcgagagctgttcccatgggaataacgtccaaaacactctggatcttatatggagaatgacattgattctcctgtccttgtacatgtacctgactggggtcattgtgtaagacttattattttatcctgaaacctttataaacaaacctctgcaaaaaaaaaaaaaaaaaaaactcgag

SEQ ID NO: 14311 - protein, 286 aa, Homo sapiens
  misc_feature (1)..(286): Xaa=Unknown amino acid
MSDDFLWFEGIAFPTMGFRSETLRKVRDEFVIRDEDVIILTYPKSGTNWLAEILCLMHSKGDAKWIQSVPIWERSPWVESEIGYTALSESESPRLFSSHLPIQLFPKSFFSSKAKVIYLMRNPRDVLVSGYFFWKNMKFIKKPKSWEEYFEWFCQGTVLYGSWFDHIHGWMPMREEKNFLLLSYEELKQDTGRTIEKICQFLGKTLEPEELNLILKNSSFQSMKENKMSNYSLLSVDYVVDKAQLLRKGVSGDWKNHFTVAQAEDFDKLFQEKMADLPRELFPWEX

SEQ ID NO: 14312 - DNA, 1404 bp, Rattus norvegicus
  ref <308>: DATABASE ACCESSION NUMBER: EMBL / D17349
  ref <309>: DATABASE ENTRY DATE: 2001-11-22
gtaccctgaggctcacatgacttgtcctttgtgcccacaggaaagcgcatttgtcttggagaaggcattgcccaaaatgaattgttcattttcttcaccgccatcctccagaacttctctttggcaagccctgtggctcctgaggacattgacctcagtcccattaacagtggtataagcaaaataccctcaccataccagattcacttcctgtcccgctgtgtgggttgagagaggagtgtcaacgtctcacttttccccaactccataccctgtgaatggaataggaaaagctaatgaagggcctttcttgatgtaaagacagagagacttctggaggccacagcttgttctgagtcacctctctcatgcttgttaacagccatagtccctacttgccagtctatattccaggatctgtgtgaatagactacagatggtttctcttgagttggctccaccctactccgtgtgttgtgttggagggtcatgtgtgaggacctcattgatagatgagtaagagaccccatgaatgtatcacagtgctagtgagtggtggggacaagatcacgctgtgagtttagaagtgtgacccctctcctgcttgtgtttacatgcagatgaaatccatataacgaagctgacaaaattttttagttttgtattcagtgccagaggctcatgtagttcacactgacctcaaaatcctatatatattcaaagatgtcttgaaatctcgatctcctgaccagtgctgccatcacaggcacatggacctacacccagattttaacatgactatatcttaatgtttatattttaatctcctttaatttattcacaatacgtacaacttcactatctaattccaggtatcttgtcccatttaaccaacaccactccaagccccaacctattcaaagatcagtccctcattcgttctctccataacctcccctgcactggacacccacagtgccacttttgtttgacctttgtgtcaatggactggcctgacctgtgtgtcttgtagaaaaggcaaggatgtgaccttgcatgctggctgccttttatgccacacccaacttctcaggcccctgtactgtgcaggccacagtcacacaccttcacagaccttccccattcgctctcttagattctttaccctgaatcttctctctagacaaggatctcctcagccctccacccctgagctgtgtgactctacttagattctcgaacatccccctgtaagtcctccatggatctcataaatacaccaaccttcctcaccaatcaaaaaaggatccctggtatgattttgtttgagcgtggtttgcttgcttgtttgtagagacaggatctcactatctacctctggctggtcttgagctcactgaattc

SEQ ID NO: 14313 - DNA, 3052 bp, Homo sapiens
  ref <308>: DATABASE ACCESSION NUMBER: Refseq / NM_000767
  ref <309>: DATABASE ENTRY DATE: 2002-05-10
caggaccatggaactcagcgtcctcctcttccttgcactcctcacaggactcttgctactcctggttcagcgccaccctaacacccatgaccgcctcccaccagggccccgccctctgccccttttgggaaaccttctgcagatggatagaagaggcctactcaaatcctttctgaggttccgagagaaatatggggacgtcttcacggtacacctgggaccgaggcccgtggtcatgctgtgtggagtagaggccatacgggaggcccttgtggacaaggctgaggccttctctggccggggaaaaatcgccatggtcgacccattcttccggggatatggtgtgatctttgccaatggaaaccgctggaaggtgcttcggcgattctctgtgaccactatgagggacttcgggatgggaaagcggagtgtggaggagcggattcaggaggaggctcagtgtctgatagaggagcttcggaaatccaagggggccctcatggaccccaccttcctcttccagtccattaccgccaacatcatctgctccatcgtctttggaaaacgattccactaccaagatcaagagttcctgaagatgctgaacttgttctaccagactttttcactcatcagctctgtattcggccagctgtttgagctcttctctggcttcttgaaatactttcctggggcacacaggcaagtttacaaaaacctgcaggaaatcaatgcttacattggccacagtgtggagaagcaccgtgaaaccctggaccccagcgcccccaaggacctcatcgacacctacctgctccacatggaaaaagagaaatccaacgcacacagtgaattcagccaccagaacctcaacctcaacacgctctcgctcttctttgctggcactgagaccaccagcaccactctccgctacggcttcctgctcatgctcaaataccctcatgttgcagagagagtctacagggagattgaacaggtgattggcccacatcgccctccagagcttcatgaccgagccaaaatgccatacacagaggcagtcatctatgagattcagagattttccgaccttctccccatgggtgtgccccacattgtcacccaacacaccagcttccgagggtacatcatccccaaggacacagaagtatttctcatcctgagcactgctctccatgacccacactactttgaaaaaccagacgccttcaatcctgaccactttctggatgccaatggggcactgaaaaagactgaagcttttatccccttctccttagggaagcggatttgtcttggtgaaggcatcgcccgtgcggaattgttcctcttcttcaccaccatcctccagaacttctccatggccagccccgtggccccagaagacatcgatctgacaccccaggagtgtggtgtgggcaaaatacccccaacataccagatccgcttcctgccccgctgaaggggctgagggaagggggtcaaaggattccagggtcattcagtgtccccgcctctgtagacaatggctctgactccccgcaacttcctgcctctgagagacctgctacaagccagcttccttcccctccatggcaccagttgtctgaggtcacattgcaagtgagtgcaggagtgagattatcgaaaattataatatacaaaatcatatatatatatatgttcttgttttttgagacagagtctcacactgttgcccaggctggagtgcagtggcgtgatctcggctcactgcaacctccacccccggggatcaagcaactctcctgcctcagcctccctagtagctgggattacaggcatgcactaccacgcttggctaatttttgtatttttagtagagatggggtttcactgtgtaggccaggctggtctcgaactcctgaactcaagtgattcacccaccttagcctcccaaagtgctgggattacaggcgtgagtcaccgtgcccagccatgtatatatataattttaaaaattaagctgaaattcacataacataaaattagctgttttaaagtgtaaaatttagtggcgtgtggttcattcacaaagctgtacaaccaccaccatctagttccaaacattttctttttttctgagatggagtctcactctgtcacccaggttcgagttcagtggtgccatctctgtccactgcaacctccacatcctgggttcaagtgattctcctgcctcagcctctggaggagctggtatcacaggcgtcccccaccacgcctggctaaattttgtatttttaggtggtcttgaactcctgatgtcaggtgattctcctagctccaaatgttttcattatctctcccccaacaaaacccatacctatcaagctgtcactccccataccccattctctttttcatctcggcccctgtcaatctggtttttgtcactatggacttaccaattctgaatatttcccataaacagaatcatacaatatttgattttttttttttttttgaaactaagccttgctctgtctcccaggctggagtgctatggtgcaatttttgttcactgcaacctctgccttccaagatcaagagattctccagtctcagctcccaagtagctgggattacaggcatgtactaccatgcctggctaattttcttgtagttttagtagggacatgttggccaggctggtggtgagctcctggcctcaggtgatccacccacctcagtgttccaaagtgctgatattacaggcataatatgtgatcttttgtgtctggttgctttcatgttgaatgctatttttgaggttcatgcctgttgtagaccacagtcacacactgctgtagtcttccccagtcctcattcccagctgcctcttcctactgcttccgtctatcaaaaagcccccttggcccaggttccctgagctgtgggattctgcactggtgctttggattccctgatatgttccttcaaatctgctgagaattaaataaacatctctaaagcctgacctccccacgtc

SEQ ID NO: 14314 - protein, 491 aa, Homo sapiens
  ref <308>: DATABASE ACCESSION NUMBER: Refseq / NP_000758
  ref <309>: DATABASE ENTRY DATE: 2002-05-10
MELSVLLFLALLTGLLLLLVQRHPNTHDRLPPGPRPLPLLGNLLQMDRRGLLKSFLRFREKYGDVFTVHLGPRPVVMLCGVEAIREALVDKAEAFSGRGKIAMVDPFFRGYGVIFANGNRWKVLRRFSVTTMRDFGMGKRSVEERIQEEAQCLIEELRKSKGALMDPTFLFQSITANIICSIVFGKRFHYQDQEFLKMLNLFYQTFSLISSVFGQLFELFSGFLKYFPGAHRQVYKNLQEINAYIGHSVEKHRETLDPSAPKDLIDTYLLHMEKEKSNAHSEFSHQNLNLNTLSLFFAGTETTSTTLRYGFLLMLKYPHVAERVYREIEQVIGPHRPPELHDRAKMPYTEAVIYEIQRFSDLLPMGVPHIVTQHTSFRGYIIPKDTEVFLILSTALHDPHYFEKPDAFNPDHFLDANGALKKTEAFIPFSLGKRICLGEGIARAELFLFFTTILQNFSMASPVAPEDIDLTPQECGVGKIPPTYQIRFLPR

SEQ ID NO: 14315 - DNA, 1072 bp, Rattus norvegicus; identical to SEQ ID NO: 2211
  ref <308>: DATABASE ACCESSION NUMBER: EMBL / D84418
  ref <309>: DATABASE ENTRY DATE: 1997-04-25

SEQ ID NO: 14316 - protein, 209 aa, Rattus norvegicus; identical to SEQ ID NO: 2212
  ref <308>: DATABASE ACCESSION NUMBER: SWISS-Prot / P52925
  ref <309>: DATABASE ENTRY DATE: 2002-06-15

SEQ ID NO: 14317 - DNA, 1301 bp, Homo sapiens; identical to SEQ ID NO: 12540
  ref <308>: DATABASE ACCESSION NUMBER: EMBL / X62534
  ref <309>: DATABASE ENTRY DATE: 1991-11-29

SEQ ID NO: 14318 - protein, 210 aa, Homo sapiens; identical to SEQ ID NO: 12541
  misc_feature (1)..(210): Xaa=Unknown amino acid

SEQ ID NO: 14319 - DNA, 711 bp, Rattus norvegicus; identical to SEQ ID NO: 12560
  ref <308>: DATABASE ACCESSION NUMBER: EMBL / D88586
  ref <309>: DATABASE ENTRY DATE: 1997-04-25

SEQ ID NO: 14320 - protein, 155 aa, Rattus norvegicus; identical to SEQ ID NO: 12561
  ref <308>: DATABASE ACCESSION NUMBER: SWISS-Prot / P70709
  ref <309>: DATABASE ENTRY DATE: 1998-07-15

SEQ ID NO: 14321 - DNA, 715 bp, Homo sapiens; identical to SEQ ID NO: 12562
  ref <308>: DATABASE ACCESSION NUMBER: EMBL / X15161
  ref <309>: DATABASE ENTRY DATE: 1995-03-22

SEQ ID NO: 14322 - protein, 160 aa, Homo sapiens; identical to SEQ ID NO: 12563
  ref <308>: DATABASE ACCESSION NUMBER: SWISS-Prot / P12724
  ref <309>: DATABASE ENTRY DATE: 2002-06-15

SEQ ID NO: 14323 - DNA, 2483 bp, Rattus norvegicus
  ref <308>: DATABASE ACCESSION NUMBER: Refseq / NM_031016
  ref <309>: DATABASE ENTRY DATE: 2001-04-11
tcgatccaatggatttcttggtttcctgtatggaatgttaacaatctgtgttatacactattgagatgcagacgtggcttcctttggcccaacactttggaggccaggattcattgtctatctctgtttgcttgaagcccaacccaccacgagccaatcctttgtcttgttctgtgtctcatagtacttttttccttggttccttctgtgcctggtaatttccgcagcggccacaacttcattaagagagaaactgtcaagttcaagaaggaagtgaagttggtctaacataccacagaaatttttctcaaaagaatcagaaaaaagggaagtacatcggcatgtttggaagggggatgccttcaaagatctttctttactgttgctgtctttgccggaattccgcgacaggtttaaatgtttctttggccacttgactactgaacacaaaatgaataactcaacaaactcctcgaacaatggcttggctattaccagtccttacaagacatttgaagtggtatttattgtccttgtggctggatccctcagtctggtgaccatcattgggaacattctggtcatggtttccattaaagtcagccgccaccttcagactgtcaacaattacttcttgttcagcctggcctgtgctgacctcatcataggtgttttctccatgaacttgtataccctctacactgtgattggctactggcctttgggacctgtagtatgtgacctatggctagcattggactatgttgtcagcaatgcctccgttatgaatctcctcatcatcagctttgatagatacttctgtgtcacgaaacctctgacctacccagttaagcggaccacaaaaatggcaggcatgatgattgcagctgcgtgggtcctttccttcatcctctgggccccagccattctcttctggcagttcatcgtaggggtgaggactgtggaggatggggaatgctatattcagttcttttccaatgcggccgtcaccttcggcactgccattgcagcgttctatctgcctgtcatcatcatgactgtgctctattggcatatatcccgggcaagcaagagtagaataaagaaggaaaagaaggaacctgtggccaaccaagacccagtatctccaagtctggtgcaaggaagaattgtaaagccaaacaataacaatatgcctggtggtgatggcggcctggaacacaacaagatccagaatggcaaggctccacgggacggcgtgactgaaacctgtgttcaaggggaggagaaagagagctccaatgattcgacgtcatcagctgctgtggcctccaatatgagagatgatgagataacccaggatgaaaacacagtttccacttcgctggaccactccagagatgacaactctaagcaaacatgcatcaaaattgtcaccaaggcccaaaaaggtgatgtgtacaccccaacgagtaccactgtagaactagttgggtcgtcgggtcagagtggggatgaaaagcagaacgttgtagcccgcaaaatcgtgaagatgcccaagcagcctgccaaaaagaagcctccaccatcccgggaaaagaaagtgaccaggacaatcttggctatcctgttggctttcatcataacgtgggcgccatacaatgtcatggtgctcatcaatactttctgtgcaccctgcatccccaatacagtatggacaattggctactggctctgttacatcaatagcaccatcaatccggcctgctatgcgctttgtaatgccaccttcaaaaagacttttaagcacctcctcatgtgtcattacaagaacataggcgctacacggtgaaaagaccatcaaaagaagaaatgtggtcgagtgtgtcttggggaagaacagcgaccagaaagctgtgtttatagtgacctgccatttcactttacagtcttactgcaacatgaaagtaaggagttttagagagacactatcattgcgcccatgctccgttttggaaagactaccttattaaactctcaccttataaaccctgtcagtttaggagcaccgagaaattgaaagaggcatgctgaaactgcagatctaaggaaaaatctctactgtctcctgctctcttgaagaagggcgtcagagtctacaatttcatgtctctgcacaagaagaataacctagtctatttgttgtttctttctgttgttcccctgtgtggcggtgagaaagaaatgacacattccatgctaacacagagacctacatggaaagaagcaggcactgtacaatgagagagaagaagaaagaaaatcaaataggatgcagagatggtctgcagagcacgagcatatatatcctcggctgtgctgtgctctgatcggaaggatttcaacacaacaacctgcttatttcttctctcttgccccctcccctgccgatggaaatcaagaaagccaacaacaaccagtcg

SEQ ID NO: 14324 - protein, 466 aa, Rattus norvegicus
  ref <308>: DATABASE ACCESSION NUMBER: Refseq / NP_112278
  ref <309>: DATABASE ENTRY DATE: 2001-04-11
MNNSTNSSNNGLAITSPYKTFEVVFIVLVAGSLSLVTIIGNILVMVSIKVSRHLQTVNNYFLFSLACADLIIGVFSMNLYTLYTVIGYWPLGPVVCDLWLALDYVVSNASVMNLLIISFDRYFCVTKPLTYPVKRTTKMAGMMIAAAWVLSFILWAPAILFWQFIVGVRTVEDGECYIQFFSNAAVTFGTAIAAFYLPVIIMTVLYWHISRASKSRIKKEKKEPVANQDPVSPSLVQGRIVKPNNNNMPGGDGGLEHNKIQNGKAPRDGVTETCVQGEEKESSNDSTSSAAVASNMRDDEITQDENTVSTSLDHSRDDNSKQTCIKIVTKAQKGDVYTPTSTTVELVGSSGQSGDEKQNVVARKIVKMPKQPAKKKPPPSREKKVTRTILAILLAFIITWAPYNVMVLINTFCAPCIPNTVWTIGYWLCYINSTINPACYALCNATFKKTFKHLLMCHYKNIGATR

SEQ ID NO: 14325 - DNA, 1400 bp, Homo sapiens
  misc_feature (1)..(1400): n=a, c, g or t
  ref <308>: DATABASE ACCESSION NUMBER: EMBL / AF385588
  ref <309>: DATABASE ENTRY DATE: 2001-06-28
atgaataactcaacaaactcctctaacaatagcctggctcttacaagtccttataagacatttgaagtggtgtttattgtcctggtggctggatccctcagtttggtgaccattatcgggaacatcctagtcatggtttccattaaagtcaaccgccacctccagaccgtcaacaattactttttattcagcttggcctgtgctgaccttatcataggtgttttctccatgaacttgtacaccctctacactgtgattggttactggcctttgggacctgtggtgtgtgacctttggctagccctggactatgtggtcagcaatgcctcagttatgaatctgctcatcatcagctttgacaggtacttctgtgtcacaaaacctctgacctacccagtcaagcggaccacaaaaatggcaggtatgatgattgcagctgcctgggtcctctctttcatcctctgggctccagccattctcttctggcagttcattgtaggggtgagaactgtggaggatggggagtgctacattcagtttttttccaatgctgctgtcacctttggtacggctattgcagccttctatttgccagtgatcatcatgactgtgctatattggcacatatcccgagccagcaagagcaggataaagaaggacaagaaggagcctgttgccaaccaagaccccgtttctccaagtctggtacaaggaaggatagtgaagccaaacaataacaacatgcccagcagtgacgatggcctggagcacaacaaaatccagaatggcaaagcccccagggatcctgtgactgaaaactgtgttcagggagaggagaaggagagctccaatgactccacctcagtcagtgctgttgcctctaatatgagagatgatgaaataacccaggatgaaaacacagtttccacttccctgggccattccaaagatgagaactctaagcaaacatgcatcagaattggcaccaagaccccaaaaagtgactcatgtaccccaactaataccaccgtggaggtagtggggtcttcaggtcagaatggagatgaaaagcagaatattgtagcccgcaagattgtgaagatgactaagcagcctgcaaaaaagaagcctcctccttcccgggaaaagaaagtcaccaggacaatcttggctattctgttggctttcatcatcacttgggccccatacaatgtcatggtgctcattaacaccttttgtgcaccttgcatccccaacactgtgtggacaattggttactggctttgttacatcaacagcactatcaaccctgcctgctatgcactttgcaatgccaccttcaagaagacctttaaacaccttctcatgtgaccccgtgcctttctttganccttggaang

SEQ ID NO: 14326 - protein, 456 aa, Homo sapiens
  ref <308>: DATABASE ACCESSION NUMBER: SWISS-Prot / AAK68113
  ref <309>: DATABASE ENTRY DATE: 2003-02-01
MNNSTNSSNNSLALTSPYKTFEVVFIVLVAGSLSLVTIIGNILVMVSIKVNRHLQTVNNYFLFSLACADLIIGVFSMNLYTLYTVIGYWPLGPVVCDLWLALDYVVSNASVMNLLIISFDRYFCVTKPLTYPVKRTTKMAGMMIAAAWVLSFILWAPAILFWQFIVGVRTVEDGECYIQFFSNAAVTFGTAIAAFYLPVIIMTVLYWHISRASKSRIKKDKKEPVANQDPVSPSLVQGRIVKPNNNNMPSSDDGLEHNKIQNGKAPRDPVTENCVQGEEKESSNDSTSVSAVASNMRDDEITQDENTVSTSLGHSKDENSKQTCIRIGTKTPKSDSCTPTNTTVEVVGSSGQNGDEKQNIVARKIVKMTKQPAKKKPPPSREKKVTRTILAILLAFIITWAPYNVMVLINTFCAPCIPNTVWTIGYWLCYINSTINPACYALCNATFKKTFKHLLM

SEQ ID NO: 14327 - DNA, 1466 bp, Rattus norvegicus
  ref <308>: DATABASE ACCESSION NUMBER: EMBL / J03577
  ref <309>: DATABASE ENTRY DATE: 2000-03-04
ctggaaagggagatgtggaaaggcatggcctggctttccttctacctcctaaatgttctctgggctgtggcaggaaccagtaccagagcccagcgctcttgctctgtccccccagatcagcagccctgggtcaatggcctacaattgctcatggaaaactcagtaactgagtcagacctcccaaaccccagcatcctgattgccatgaacctggccagcacctacaacctggaggcccagaagctcctgacttaccagctcatggccagtgacagtgcagacctgacaaatgggcagctcgccctcaccattatggctctcacctcctcctgccgagaccctggaagtaaagtgtccattctacaaaagaatatggagagctggacaccttcaaacctgggtgctgaatcctcatccttctatgggcctgctctggcgatccttgcactgtgccagaagaactcagaggcaaccttacccatcgcggtgcgcttcgctaagaccctcatgatggaatcctctcccttcagtgtggacacaggagcagtggcaaccttggccctgacatgcatgtacaacaggattcctgtgggttctcaggaaaactacagagacctgtttggtcaggcactgaaggttattgtggataatatcagcttgaggatcaaagctgatggtattattggagacatctacagcactggccttgccatgcaggctctctctgtgacacctgagcaacctaccaaagagtgggactgtgagaagactatgtatacgatactcaaggagattaagcaggggaaattccagaaccccatgtccattgcccagattctcccttccttgaaaggcaagacttacctagatgtgccccaagtaacgtgtggccctgatcatgaagtgccaccaactttaactgactatcctaccccggtccccacttcaatatctaatatcacagtcatatacaccataaacaaccagctgaggggggttgatctgcttttcaatgtgaccatcgaggttagtgtgaaaagtggatctgtgctccttgctgtcctggaagaagcgcagcgcagaaaccacatgttcaaatttgaaaccacaatgacatcctggggccttattgtctcttctatcaacaatatcgctgagaatgttaagcacaagacctattgggagttccttagtggcaaaacgcctttgggtgaaggggttgcatactatattcccttcaactacgagcacatcacagccaacttcacccaatactgagaaggagtatcttctgttgtatgtgaccaaaggatggtttggtttcttttcatatcgtttcaaatctgtaccaagaaaagcagatattaacagtgctactccattcctgagccacggtgtggaataaatgatgcaggttcctgaggtgctcaccactgtgactcatgaaataaaattcctggcttctc

SEQ ID NO: 14328 - protein, 417 aa, Rattus norvegicus
  ref <308>: DATABASE ACCESSION NUMBER: SWISS-Prot / P17267
  ref <309>: DATABASE ENTRY DATE: 2002-06-15
MAWLSFYLLNVLWAVAGTSTRAQRSCSVPPDQQPWVNGLQLLMENSVTESDLPNPSILIAMNLASTYNLEAQKLLTYQLMASDSADLTNGQLALTIMALTSSCRDPGSKVSILQKNMESWTPSNLGAESSSFYGPALAILALCQKNSEATLPIAVRFAKTLMMESSPFSVDTGAVATLALTCMYNRIPVGSQENYRDLFGQALKVIVDNISLRIKADGIIGDIYSTGLAMQALSVTPEQPTKEWDCEKTMYTILKEIKQGKFQNPMSIAQILPSLKGKTYLDVPQVTCGPDHEVPPTLTDYPTPVPTSISNITVIYTINNQLRGVDLLFNVTIEVSVKSGSVLLAVLEEAQRRNHMFKFETTMTSWGLIVSSINNIAENVKHKTYWEFLSGKTPLGEGVAYYIPFNYEHITANFTQY

SEQ ID NO: 14329 - DNA, 1584 bp, Homo sapiens
  ref <308>: DATABASE ACCESSION NUMBER: EMBL / M63154
  ref <309>: DATABASE ENTRY DATE: 2000-03-04
cggggcagctctgaggaacaaggtggaagctcagagcgctggtctccaccctggtgcccctgggctggtgctggcagtgggagccgtggctgtggatgagagacatagacgagagagtgagatggcctggtttgccctctacctcctgagccttctctgggctacagctgggactagtacccagacccagagttcatgctccgttccctcagcacaggagcccttggtcaatggaatacaagtactcatggagaactcggtgacttcatcagcctacccaaaccccagcatcctgattgccatgaatctggccggagcctacaacttgaaggcccagaagctcctgacttaccagctcatgtccagcgacaacaacgatctaaccattgggcacctcggcctcaccatcatggccctcacctcctcctgccgagaccctggggataaagtatccattctacaaagacaaatggagaactgggcaccttccagccccaacgctgaagcatcagccttctatgggcccagtctagcgatcttggcactgtgccagaagaactctgaggcgaccttgccgatagccgtccgctttgccaagaccctgctggccaactcctctcccttcaatgtagacacaggagcaatggcaaccttggctctgacctgtatgtacaacaagatccctgtaggttcagaggaaggttacagatccctgtttggtcaggtactaaaggatattgtggagaaaatcagcatgaagatcaaagataatggcatcattggagacatctacagtactggcctcgccatgcaggctctctctgtaacacctgagccatctaaaaaggaatggaactgcaagaagactacggatatgatactcaatgagattaagcaggggaaattccacaaccccatgtccattgctcaaatcctcccttccctgaaaggcaagacatacctagatgtgccccaggtcacttgtagtcctgatcatgaggtacaaccaactctacccagcaaccctggccctggccccacctctgcatctaacatcactgtcatatacaccataaataaccagctgaggggggttgagctgctcttcaacgagaccatcaatgttagtgtgaaaagtgggtcagtgttacttgttgtcctagaggaagcacagcgcaaaaatcctatgttcaaatttgaaaccacaatgacatcttggggccttgtcgtctcttctatcaacaatatcgcggaaaatgttaatcacaagacatactggcagtttcttagtggtgtaacacctttgaatgaaggggttgctgactacatacccttcaaccacgagcacatcacagccaatttcacacagtactaacgaagaggtgggttcagcttctatcaaacatctccaaaggatgggtgaaattttttccacttcattttaaatctatgcaaaaaagcgaatgcctgtgatgctaccatattcctggtaaaaacatggagaaccactatgtagaataaaaatgcaaagttcactggagtctcaacatctatgactcatgaaaataaaattttcatcttctc

SEQ ID NO: 14330 - protein, 417 aa, Homo sapiens
  ref <308>: DATABASE ACCESSION NUMBER: SWISS-Prot / P27352
  ref <309>: DATABASE ENTRY DATE: 2002-06-15
MAWFALYLLSLLWATAGTSTQTQSSCSVPSAQEPLVNGIQVLMENSVTSSAYPNPSILIAMNLAGAYNLKAQKLLTYQLMSSDNNDLTIGHLGLTIMALTSSCRDPGDKVSILQRQMENWAPSSPNAEASAFYGPSLAILALCQKNSEATLPIAVRFAKTLLANSSPFNVDTGAMATLALTCMYNKIPVGSEEGYRSLFGQVLKDIVEKISMKIKDNGIIGDIYSTGLAMQALSVTPEPSKKEWNCKKTTDMILNEIKQGKFHNPMSIAQILPSLKGKTYLDVPQVTCSPDHEVQPTLPSNPGPGPTSASNITVIYTINNQLRGVELLFNETINVSVKSGSVLLVVLEEAQRKNPMFKFETTMTSWGLVVSSINNIAENVNHKTYWQFLSGVTPLNEGVADYIPFNHEHITANFTQY

SEQ ID NO: 14331 - DNA, 5106 bp, Rattus norvegicus; identical to SEQ ID NO: 12609
  ref <308>: DATABASE ACCESSION NUMBER: EMBL / J03806
  ref <309>: DATABASE ENTRY DATE: 2000-03-04

SEQ ID NO: 14332 - protein, 1290 aa, Rattus norvegicus; identical to SEQ ID NO: 12610
  ref <308>: DATABASE ACCESSION NUMBER: PIR / A31317
  ref <309>: DATABASE ENTRY DATE: 2000-03-31

SEQ ID NO: 14333 - DNA, 4408 bp, Homo sapiens; identical to SEQ ID NO: 12611
  ref <308>: DATABASE ACCESSION NUMBER: EMBL / M34667
  ref <309>: DATABASE ENTRY DATE: 2000-03-04

SEQ ID NO: 14334 - protein, 1290 aa, Homo sapiens; identical to SEQ ID NO: 12612
  ref <308>: DATABASE ACCESSION NUMBER: SWISS-Prot / P19174
  ref <309>: DATABASE ENTRY DATE: 2002-06-15

SEQ ID NO: 14335 - DNA, 3561 bp, Rattus norvegicus
  ref <308>: DATABASE ACCESSION NUMBER: EMBL / J05509
  ref <309>: DATABASE ENTRY DATE: 2000-03-04
gctaggcaaagagtctcccctttggaaattttcctgcttttgcaaaatgatgactatttctttgatttggggaattgccgtgttggtgagctgttgcatatggtttattgttggaataaggagaaggaaagctggtgaacctcctttggagaacgggttgattccgtacctgggctgtgctctgaaatttggatctaatcctcttgagttcctaagagctaatcaaaggaagcatggtcacgtttttacctgcaaactgatggggaaatatgtccatttcatcacaaactccctgtcataccacaaagtcttatgtcatggaaaatattttgactggaaaaaatttcattacactacttctgcgaaggcatttggacacagaagcattgacccaaatgatggaaataccacggaaaatataaacaacacttttaccaaaaccctccagggagatgctctgtgttcactttctgaagccatgatgcaaaacctccaatctgtcatgagacctcctggccttcctaaatcaaagagcaatgcctgggtcacggaagggatgtatgccttctgttaccgagtgatgtttgaagccggctatctaacactgtttggcagagatatttcaaagacagacacacaaaaagcacttattctaaacaaccttgacaacttcaaacaatttgaccaagtctttccggcactggtggcaggccttcctattcacttgttcaagaccgcacataaagctcgggaaaagctggctgagggattgaagcacaagaacctgtgtgtgagggaccaggtctctgaactgatccgtctacgtatgtttctcaatgacacgctctccacctttgacgacatggagaaggccaagacgcacctcgctatcctctgggcatctcaagcaaacaccattcctgcaaccttttggagcttatttcaaatgatcaggagtcctgaagcaatgaaagcagcctctgaagaagtgagtggagctttacagagtgctggccaagagctcagctctggagggagtgccatttacttggatcaagtgcaactgaatgacctgccggtactagacagcatcatcaaggaggctctgaggctttccagtgcatccttgaatatccgcacagctaaggaggacttcactctccatcttgaggacggttcctataacatccgaaaagatgacatgatagctctttatccacagttaatgcacttggatcctgaaatctacccagaccctttgactttcaaatatgaccggtaccttgatgaaagcgggaaagcaaagaccaccttctacagtaatggaaacaagctgaagtgtttctacatgcccttcggatcaggcgcgacaatatgtcctggaagactctttgccgtccaagaaatcaagcagtttttgatcctgatgctctcctgctttgaactggagtttgtggagagccaagtcaagtgtccccctctagaccagtcccgggcaggcttgggaattttgccaccactacatgatattgagtttaaatataaactgaaacactgatacgtggttggaagaagcgaacactggatgatgtcacttggcggctgagagtcatcacttaaacaggccttcgggaccaatgctcactgatgcgccctagcgactggattagtgggaagaactttgttctcgctgcccacattcctgggtgttcacatagctggggccagagcttcatcactttcagaaagcaatgtcttttgtatttattttcaaaatgaagatattccaattggcaggatatttttcctaaggaaattgctttatatttttatgaaaactaccaattaattatgaaaggcttgaaattcacgttttagtgaaattactgatttttcactagtaaggttcttcaggtgtgaaactgtattataaaaatgttgtaatgggtcacactgtgctttgcataaaggtaaaggaaactatgtttcagccttttctgtgtctatgagattcgaaaataatcttactgttctagaaacactggggagaatccgacatcgtctagctatattttattttactgttgcgagaaattttaattccagttttcaactaccttatctttcccccattttgacatgcatgccaatgagaagagtattttttaggaattaacaaggcacctcccagaaccctaccctgagacttttaagcctttaatcccagcactcgagaagtaagagccaggcaagatctctgagtctgaggttattctggtctacatcagctccagataagccaggactacagaatgggatcttgtctaaaaaatacagctaatctttatgtcataactgattatgaatcaacctaaaagataaattttcaatcaggactcagagaaaatgagcaattaaaaaacttagctctgaggtatgtggaattcattaagtacaagttgacattacatgttctttaaaaatagtttatgttttatctctaaatgccctgcagatgaagaataataatgaaaagttgaataatactgtttaaacactaagtgcaataatgctttggtaatgtactttaagagaatcattagccgtgccagttttactaaaatatatttatatgtaaattatatttatctttttcttataccataaatataaaaatattgcaacatttaggtaatttttaaaattacatacctttcagaaaattcgaatggtatgaatgtttgtatgttttttaactttgaacagaacatttaaattattcatctacggtgatttttatcttatttatttctttttgtctcattcatatcttgaagaaatccaaaaatatctgaaggaatcgctcactcaaatctctccctatcgttacagaaaaattcaataccatctctttttcctcggggactgaagcagggtctcgtgggtcccgagcagaggctcctgctgcagcgagctttatccacgggactccttaaaccttttaaaatcttatcactattatcatgcagttattacctaagtaggatatttccctttcctttttcatttcagcagagtcccttagcaacccaggctgactgggaccctccatgtagcttaagctgtgaactcactgtacttctgttttcacttattttaggaagtaattttccctatcagaaattttaattgtttagatgatgtataagagtaacacaattctgttatatactaatctgtagtaactaattgttcttagacagttgatgactctcaattgatgatcatacatctttccatggcttcttgaatgcccatttctcatacacagaataatgggtttcacggtgatatcttcctttcatgtctttattcttgtgcggtgatggttggcaaatgatacccatggagcaaggttactcttcctatttctgtgcagcctaagtgttaagaaataaattttttaaatacttagagggaaggcacattttgtgtcatatgtgagtgacatgtgacacacagactagcaatccatgagtaaaattttattgggattaccgg

SEQ ID NO: 14336 - protein, 503 aa, Rattus norvegicus
  ref <308>: DATABASE ACCESSION NUMBER: SWISS-Prot / P18125
  ref <309>: DATABASE ENTRY DATE: 2002-06-15
MMTISLIWGIAVLVSCCIWFIVGIRRRKAGEPPLENGLIPYLGCALKFGSNPLEFLRANQRKHGHVFTCKLMGKYVHFITNSLSYHKVLCHGKYFDWKKFHYTTSAKAFGHRSIDPNDGNTTENINNTFTKTLQGDALCSLSEAMMQNLQSVMRPPGLPKSKSNAWVTEGMYAFCYRVMFEAGYLTLFGRDISKTDTQKALILNNLDNFKQFDQVFPALVAGLPIHLFKTAHKAREKLAEGLKHKNLCVRDQVSELIRLRMFLNDTLSTFDDMEKAKTHLAILWASQANTIPATFWSLFQMIRSPEAMKAASEEVSGALQSAGQELSSGGSAIYLDQVQLNDLPVLDSIIKEALRLSSASLNIRTAKEDFTLHLEDGSYNIRKDDMIALYPQLMHLDPEIYPDPLTFKYDRYLDESGKAKTTFYSNGNKLKCFYMPFGSGATICPGRLFAVQEIKQFLILMLSCFELEFVESQVKCPPLDQSRAGLGILPPLHDIEFKYKLKH

SEQ ID NO: 14337 - DNA, 2852 bp, Homo sapiens
  ref <308>: DATABASE ACCESSION NUMBER: EMBL / X56088
  ref <309>: DATABASE ENTRY DATE: 1995-01-07
agattttcttcctcagagattttggcctagatttgcaaaatgatgaccacatctttgatttgggggattgctatagcagcatgctgttgtctatggcttattcttggaattaggagaaggcaaacgggtgaaccacctctagagaatggattaattccatacctgggctgtgctctgcaatttggtgccaatcctcttgagttcctcagagcaaatcaaaggaaacatggtcatgtttttacctgcaaactaatgggaaaatatgtccatttcatcacaaatcccttgtcataccataaggtgttgtgccacggaaaatattttgattggaaaaaatttcactttgctacttctgcgaaggcatttgggcacagaagcattgacccgatggatggaaataccactgaaaacataaacgacactttcatcaaaaccctgcagggccatgccttgaattccctcacggaaagcatgatggaaaacctccaacgtatcatgagacctccagtctcctctaactcaaagaccgctgcctgggtgacagaagggatgtattctttctgctaccgagtgatgtttgaagctgggtatttaactatctttggcagagatcttacaaggcgggacacacagaaagcacatattctaaacaatcttgacaacttcaagcaattcgacaaagtctttccagccctggtagcaggcctccccattcacatgttcaggactgcgcacaatgcccgggagaaactggcagagagcttgaggcacgagaacctccaaaagagggaaagcatctcagaactgatcagcctgcgcatgtttctcaatgacactttgtccacctttgatgatctggagaaggccaagacacacctcgtggtcctctgggcatcgcaagcaaacaccattccagcgactttctggagtttatttcaaatgattaggaacccagaagcaatgaaagcagctactgaagaagtgaaaagaacattagagaatgctggtcaaaaagtcagcttggaaggcaatcctatttgtttgagtcaagcagaactgaatgacctgccagtattaaatagtataatcaaggaatcgctgaggctttccagtgcctccctcaacatccggacagctaaggaggatttcactttgcaccttgaggacggttcctacaacatccgaaaagatagcatcatagctctttacccacagttaatgcacttagatccagaaatctacccagaccctttgacttttaaatatgataggtatcttgatgaaaacgggaagacaaagactaccttctattgtaatggactcaagttaaagtattactacatgccctttggatcgggagctacaatatgtcctggaagattgttcgctatccacgaaatcaagcaatttttgattctgatgctttcttattttgaattggagcttatagagggccaagctaaatgtccacctttggaccagtcccgggcaggcttgggcattttgccgccattgaatgatattgaatttaaatataaattcaagcatttgtgaatacatggctggaataagaggacactagatgatattacaggactgcagaacaccctcaccacacagtccctttggacaaatgcatttagtggtggtagaaatgattcaccaggtccaatgttgttcaccagtgcttgcttgtgaatcttaacattttggtgacagtttccagatgctatcacagactctgctagtgaaaagaactagtttctaggagcacaataatttgttttcatttgtataagtccatgaatgttcatatagccagggattgaagtttattattttcaaaggaaaacacctttattttattttttttcaaaatgaagatacacattacagccaggtgtggtagcaggcacctgtagtcttagctactcgagaggccaaagaaggaggatggcttgagcccaggagttcaagaccagcctggacagcttagtgagatcccgtctccgaagaaaagatatgtattctaattggcagattgttttttcctaaggaaactgctttatttttataaaactgcctgacaattatgaaaaaatgttcaaattcacgttctagtgaaactgcattatttgttgactagatggtggggttcttcgggtgtgatcatatatcataaaggatatttcaaatgattatgattagttatgtcttttaataaaaaggaaatatttttcaacttcttctatatccaaaattcagggctttaaacatgattatcttgatttcccaaaaacactaaaggtggttttattttcccttcatgttttaacttattgttgctgaaaactctatgtccggctttaactatcttctctatatttttatttcattcacattaatgagaagagttttctcagagattaaaaaaggtagtttttctgtcattgttaaatacacattatcactgaaaaaatgtagcttttatgatgtatgttttaaagttaaaactggatggaaatagccatttggaagctttggttatgaaacatgtggagtgtattaagtgcagcttgacattatgttttatttaaatgctttttatcgctaaatgacttgcagatgaaaaaaactaaggtgactcgagtgtttaaatgcctgtgtacaacaatgctttgataaaatattttaaggtatgagttatcagctctatgtcaattgatatttctgtgtagtatttatatttaaattatatttacctttttgcttattttacaaatattaagaaaatattctaacatttgataattttgaaatgattcatctttcagaaataaaagtatgaatct

SEQ ID NO: 14338 - protein, 504 aa, Homo sapiens
  ref <308>: DATABASE ACCESSION NUMBER: PIR / JH0659
  ref <309>: DATABASE ENTRY DATE: 2000-03-03
MMTTSLIWGIAIAACCCLWLILGIRRRQTGEPPLENGLIPYLGCALQFGANPLEFLRANQRKHGHVFTCKLMGKYVHFITNPLSYHKVLCHGKYFDWKKFHFATSAKAFGHRSIDPMDGNTTENINDTFIKTLQGHALNSLTESMMENLQRIMRPPVSSNSKTAAWVTEGMYSFCYRVMFEAGYLTIFGRDLTRRDTQKAHILNNLDNFKQFDKVFPALVAGLPIHMFRTAHNAREKLAESLRHENLQKRESISELISLRMFLNDTLSTFDDLEKAKTHLVVLWASQANTIPATFWSLFQMIRNPEAMKAATEEVKRTLENAGQKVSLEGNPICLSQAELNDLPVLDSIIKESLRLSSASLNIRTAKEDFTLHLEDGSYNIRKDDIIALYPQLMHLDPEIYPDPLTFKYDRYLDENGKTKTTFYCNGLKLKYYYMPFGSGATICPGRLFAIHEIKQFLILMLSYFELELIEGQAKCPPLDQSRAGLGILPPLNDIEFKYKFKHL

SEQ ID NO: 14339 - DNA, 409 bp, Rattus norvegicus
  ref <308>: DATABASE ACCESSION NUMBER: EMBL / K03041
  ref <309>: DATABASE ENTRY DATE: 1996-10-01
tgcaactgaaatgcattctctagcttgccagtggcccccactgcctgcctgcctgcaggaactactctagacatagattcctcctccactctagcaagagaagatgctgtctaatttgaggatcctgctcaacaaggcagctcttagaaaggctcacacttccatggttcgaaattttcggtatgggaagccagtccagagtcaagtacagctgaaaggccgtgacctcctcaacctgaagaacttcacaggagaggagattcagtacatgctatggctctctgcagatctgaaattcaggatcaaacagaaaggagaatacttgcctttattgcaagggaaatccttagggatgatttttgagaaaagaagtactcgaacaagactgtccacagaaacacgcttcgct

SEQ ID NO: 14340 - protein, 354 aa, Rattus norvegicus; identical to SEQ ID NO: 12767
  ref <308>: DATABASE ACCESSION NUMBER: SWISS-Prot / OWRT
  ref <309>: DATABASE ENTRY DATE: 2001-10-16

SEQ ID NO: 14341 - DNA, 1045 bp, Homo sapiens
  ref <308>: DATABASE ACCESSION NUMBER: EMBL / D00230
  ref <309>: DATABASE ENTRY DATE: 2002-10-07
tttctttggtgtgtcatcaggctgtcatggtgtccctgctgacagattactcacctcagctccagaagcctaaattttgatgttgtgttacttgtcaagaaagaagcaatgttcttcagtaacagaatgagttggtttatggggaaaagagaagagaatctaaaaaataaacaaatccctaacacgtggtatgggtgaaccgtatgatatgctttgccattgtgaaactttccttaagcctttaatttaagtgctgatgcactgtaatacgtgcttaactttgcttaaactctctaattcccaatttctgagttacatttagatatcatattaattatcatatacatttacttcaacataaaatactgtgttcataatgtataatgtctaagccattaagtgtaatctatgcttattacctaaataaattatcacccatgctaatttataagtaaacatttaccaggcagtcagctactggtaaatctgtgggctgtgttcctgtcccccaggaccaactagaaagccaaatgattcatcttgcagatgtggtacaattttcaggccaatgaggtagacaggcattcatttatggaggcaaataacgaaattcttaaaatatagctattactgtgcccaaactccaaagttttttccaataacttgtgagaatgtggtagtggggaatcctccaagagcatgtatctcttctctgtaatgagtacttactgttacaagccataagaagcttttgttagcaagtggtaaaaccatggatacctagagtagcattttcttaggttcaaattctccaacaagaataatttaatttttttcacatctgtgcttatcatgcatctactcacaccatatgctgaatatttccataaatctactacttgcaacatttttagccaatctttttttcctctaatttttctttggggtaataaaaatttacattattgaattattataaatgtaattacaactagatttctcttgcgggtgactaacatttgtattgttgaattattatgatata

SEQ ID NO: 14342 - protein, 354 aa, Homo sapiens
  ref <308>: DATABASE ACCESSION NUMBER: SWISS-Prot / P00480
  ref <309>: DATABASE ENTRY DATE: 2002-06-15
MLFNLRILLNNAAFRNGHNFMVRNFRCGQPLQNKVQLKGRDLLTLKNFTGEEIKYMLWLSADLKFRIKQKGEYLPLLQGKSLGMIFEKRSTRTRLSTETGLALLGGHPCFLTTQDIHLGVNESLTDTARVLSSMADAVLARVYKQSDLDTLAKEASIPIINGLSDLYHPIQILADYLTLQEHYSSLKGLTLSWIGDGNNILHSIMMSAAKFGMHLQAATPKGYEPDASVTKLAEQYAKENGTKLLLTNDPLEAAHGGNVLITDTWISMGQEEEKKKRLQAFQGYQVTMKTAKVAASDWTFLHCLPRKPEEVDDEVFYSPRSLVFPEAENRKWTIMAVMVSLLTDYSPQLQKPKF

SEQ ID NO: 14343 - DNA, 725 bp, Rattus norvegicus
  ref <308>: DATABASE ACCESSION NUMBER: EMBL / L02634
  ref <309>: DATABASE ENTRY DATE: 2000-03-04
atttccaatatgaatgcagcccgggcagaatttcaatcaagagttgatgctatcaaacagtacatgaattttcgaaatgtgagcaaagacatggaaaagagagttattaaatggtttgactacctgtggactaacaaaaagacagtcgatgagagagaagttctgagatacctccctgacaaactcagggcagagattgccatcaatgttcacctagacacgttaaaaaaggttcgtatctttgctgactgtgaggctggtctgttggtggagttggtgttgaaattacaaccccaggtgtacagtcctggagattacatatgcaagaaaggggacattgggcgggagatgtacatcatcaaggaaggcaaacttgctgtggtggcagacgacggaatcacacagtttgtggtgttgagtgacggcagctactttggcgagatcagcattcttaacatcaaaggcagcaaggctggcaaccgaagaacagccaatattaagagcattggctactcggacctgttctgcctctcaaaggatgacctcatggaagctcttacagagtacccagatgccaaaactatgttggaggagaaagggaggcagatcttaatgaaagacggtctactggatataaacattgcgaatttgggcagtgaccctaaagacctggaagagaaggtcactcgaatggaggggtcagtggacctcctgcaaacacgatt

SEQ ID NO: 14344 - protein, 683 aa, Rattus norvegicus
  ref <308>: DATABASE ACCESSION NUMBER: SWISS-Prot / AAA92110
  ref <309>: DATABASE ENTRY DATE: 2001-10-16
MKTNIINTWHSFVNIPNVVVPAIEKEIRRMENGACSSFSDNDNGSLSEESENEDSLFRSNSYRRRGPSQREHYLPGTMALFNVNNSSNKDQDPKEKKKKKKEKKSKADDKKESKKDPEKKKKKEKEKEKKKEEKPKEKKEEEKKEVVVIDPSGNMYYNWLFCITLPVMYNWTMIIARACFDELQSDYLEYWLIFDYVSDVVYLADMFVRTRTGYLEQGLLVKDELKLIEKYKANLQFKLDVLSVIPTDLLYFKFGWNYPEIRLNRLLRISRMFEFFQRTETRTNYPNIFRISNLVMYIVIIIHWNACVYYSISKAIGFGNDTWVYPDVNDPEFGRLARKYVYSLYWSTLTLTTIGETPPPVLDSEYVFVVVDFLIGVLIFATIVGNIGSMISNMNAARAEFQSRVDAIKQYMNFRNVSKDMEKRVIKWFDYLWTNKKTVDEREVLRYLPDKLRAEIAINVHLDTLKKVRIFADCEAGLLVELVLKLQPQVYSPGDYICKKGDIGREMYIIKEGKLAVVADDGITQFVVLSDGSYFGEISILNIKGSKAGNRRTANIKSIGYSDLFCLSKDDLMEALTEYPDAKTMLEEKGRQILMKDGLLDINIANLGSDPKDLEEKVTRMEGSVDLLQTRFARILAEYESMQQKLKQRLTKVEKFLKPLIETEFSALEEPGGESEPTESLQG

SEQ ID NO: 14345 - DNA, 2857 bp, Homo sapiens
  ref <308>: DATABASE ACCESSION NUMBER: EMBL / S42457
  ref <309>: DATABASE ENTRY DATE: 2000-03-04
gaattccggatacacaaatcagcatgtttattatttttaaaaaattagggcctggattttgacaatgtcaagatttaccgtatatccctgtttgtttggatacaccagtgacgtccacttctagaagacaaagttatattacttaaacaaccaaagatggagtctcgctcttcgcccaggctggagtgcagtggcgcgatctcggctcactgcagtcttcacctcccagattcaagcgattttcagctaatttttgtatttttagtagagatgggatttcaccatgttggccaggctggacttgaactcctgatctcgagtgatctgcccacctcagcctcccaaagtgctggtattacagatatgaaactatccatgaagaacaatattatcaatacacagcagtcttttgtaaccatgcccaatgtgattgtaccagatattgaaaaggaaatacgaaggatggaaaatggagcatgcagctccttttctgaggatgatgacagtgcctctacatctgaagaatcagagaatgaaaaccctcatgcaaggggttcctttagttataagtcactcagaaagggaggaccatcacagagggagcagtacctgcctggtgccattgcactttttaatgtgaacaacagcagcaataaggaccaggaaccagaagagaaaaagaaaaagaaaaaagaaaagaagagcaagtcagataataaaaacgaaaataaaaacgacccagagaagaaaaagaagaaaaaggacaaagagaagaaaaagaaagaggagaaaagcaaagataagaaagaagaggagaagaaagaagttgtggttattgatccctcgggaaacacatattacaactggctgttttgcatcacattacctgttatgtacaactggacaatggttattgccagagcatgttttgatgaacttcaatctgattacctagaatattggctcattttggattacgtatcagacatagtctatttaatcgatatgtttgtacgaacaaggacaggttacctagaacaaggactgctggtaaaggaagaacttaaactcataaataaatataaatccaacttgcaatttaaacttgatgttctgtcactgataccaactgatttgctgtattttaagttagggtggaactatccagaaattagattaaacaggttgttacggttctctcgtatgtttgagttcttccagagaacagaaacaaggacaaactatccaaacatcttcaggatttccaaccttgttatgtatatcgtcatcattatccactggaatgcatgtgtgttctactctatttctaaagctattggatttggaaatgatacatgggtctaccctgatattaatgatcctgaatttggccgtttggctagaaaatacgtatacagcctttactggtctacactgactttgactaccattggtgaaacaccccctcccgtgagggattctgagtatgtctttgtggtggttgatttcctaattggagtgttaatttttgctaccatcgttggtaacataggttctatgatttccaacatgaatgcagccagagcagaatttcaagcaagaattgatgctatcaagcaatatatgcattttcgaaatgtaagcaaagatatggaaaagagggttattaaatggtttgactacctgtggaccaacaaaaaaacagttgatgagaaagaagtcttaaagtatctacctgataaactaagagcagaaattgccatcaacgttcacttagacacattaaaaaaggtacgcatttttgctgattgtgaagctggtctgttggtggagttggtcttgaaattgcaaccccaagtctacagtcctggagattatatttgcaagaaaggggatatcggacgagagatgtacattatcaaggaaggcaaactcgctgtggtggcagatgatggagtcactcagtttgtggtattgagcgatggcagctacttcggtgagatcagcattcttaacattaaagggagcaaagctggcaatcgaagaacggccaatattaaaagtattggctactcagacctgttctgtctctcaaaagatgacctcatggaagctctaactgagtacccagatgccaaaactatgctggaagagaaagggaagcagattttaatgaaagatggtctactggatctaaacattgcaaatgctggcagtgatcctaaagatcttgaagagaaggttactcgaatggaggggtcagtagacctcctgcaaaccaggtttgcccgaatcttggctgagtatgagtccatgcagcagaaactgaaacaaagattaaccaaggttgagaaatttctgaaaccgcttattgacacagaattttcaagtattgagggacctggagcggaaagtgggcccatcgactctacatagaaccgaaaagctggtcattaacagggacatgcctcatgatccttttgatcctatgactgacatcaactaaaatttaaaagaagaggaagactcagttgggaaatttttccatgaggaaaatgtgctttggtgcaaggtacaaggcccacaccctctctgagagatactatgattaaaaaagctttatatcttgggatttttcacaactgataatgtgcaaagatataaactgattaacttgtcagtgtctgtattttctgattttttcacatacgctcattttatgtaatattcttcataaaaatgaataagtagccctcactttcatgccatttccattgttgagtgaagcgtatttgaagtaactgagaattaccatgtacatcatatttgggataacatttttaaaaatcggaattcc

SEQ ID NO: 14346 - protein, 686 aa, Homo sapiens
  ref <308>: DATABASE ACCESSION NUMBER: SWISS-Prot / AAB22778
  ref <309>: DATABASE ENTRY DATE: 2001-10-16
MKNNIINTQQSFVTMPNVIVPDIEKEIRRMENGACSSFSEDDDSASTSEESENENPHARGSFSYKSLRKGGPSQREQYLPGAIALFNVNNSSNKDQEPEEKKKKKKEKKSKSDDKNENKNDPEKKKKKKDKEKKKKEEKSKDKKEEEKKEVVVIDPSGNTYYNWLFCITLPVMYNWTMVIARACFDELQSDYLEYWLILDYVSDIVYLIDMFVRTRTGYLEQGLLVKEELKLINKYKSNLQFKLDVLSLIPTDLLYFKLGWNYPEIRLNRLLRFSRMFEFFQRTETRTNYPNIFRISNLVMYIVIIIHWNACVFYSISKAIGFGNDTWVYPDINDPEFGRLARKYVYSLYWSTLTLTTIGETPPPVRDSEYVFVVVDFLIGVLIFATIVGNIGSMISNMNAARAEFQARIDAIKQYMHFRNVSKDMEKRVIKWFDYLWTNKKTVDEKEVLKYLPDKLRAEIAINVHLDTLKKVRIFADCEAGLLVELVLKLQPQVYSPGDYICKKGDIGREMYIIKEGKLAVVADDGVTQFVVLSDGSYFGEISILNIKGSKAGNRRTANIKSIGYSDLFCLSKDDLMEALTEYPDAKTMLEEKGKQILMKDGLLDLNIANAGSDPKDLEEKVTRMEGSVDLLQTRFARILAEYESMQQKLKQRLTKVEKFLKPLIDTEFSSIEGPGAESGPIDST

SEQ ID NO: 14347 - DNA, 3617 bp, Rattus norvegicus; identical to SEQ ID NO: 2758
  ref <308>: DATABASE ACCESSION NUMBER: EMBL / L03294
  ref <309>: DATABASE ENTRY DATE: 2000-03-04

SEQ ID NO: 14348 - protein, 474 aa, Rattus norvegicus; identical to SEQ ID NO: 2759
  ref <308>: DATABASE ACCESSION NUMBER: SWISS-Prot / Q06000
  ref <309>: DATABASE ENTRY DATE: 2002-06-15

SEQ ID NO: 14349 - DNA, 3549 bp, Homo sapiens; identical to SEQ ID NO: 2760
  ref <308>: DATABASE ACCESSION NUMBER: EMBL / M15856
  ref <309>: DATABASE ENTRY DATE: 1999-07-02

SEQ ID NO: 14350 - protein, 475 aa, Homo sapiens; identical to SEQ ID NO: 2761
  ref <308>: DATABASE ACCESSION NUMBER: SWISS-Prot / LIHUL
  ref <309>: DATABASE ENTRY DATE: 2002-06-15

SEQ ID NO: 14351 - DNA, 2012 bp, Rattus norvegicus; identical to SEQ ID NO: 14104
  ref <308>: DATABASE ACCESSION NUMBER: EMBL / L07380
  ref <309>: DATABASE ENTRY DATE: 2002-08-09

SEQ ID NO: 14352 - protein, 423 aa, Rattus norvegicus; identical to SEQ ID NO: 14105
  ref <308>: DATABASE ACCESSION NUMBER: Refseq / NP_036982
  ref <309>: DATABASE ENTRY DATE: 2000-11-01

SEQ ID NO: 14353 - DNA, 303 bp, Rattus norvegicus; identical to SEQ ID NO: 12676
  ref <308>: DATABASE ACCESSION NUMBER: EMBL / L13202
  ref <309>: DATABASE ENTRY DATE: 2000-03-04

SEQ ID NO: 14354 - protein, 101 aa, Rattus norvegicus; identical to SEQ ID NO: 12677
  ref <308>: DATABASE ACCESSION NUMBER: SWISS-Prot / AAA41319
  ref <309>: DATABASE ENTRY DATE: 2002-06-15

SEQ ID NO: 14355 - DNA, 1437 bp, Homo sapiens; identical to SEQ ID NO: 12678
  ref <308>: DATABASE ACCESSION NUMBER: Refseq / NM_012183
  ref <309>: DATABASE ENTRY DATE: 2002-11-05

SEQ ID NO: 14356 - protein, 478 aa, Homo sapiens; identical to SEQ ID NO: 12679
  ref <308>: DATABASE ACCESSION NUMBER: Refseq / NP_036315
  ref <309>: DATABASE ENTRY DATE: 2002-11-05

SEQ ID NO: 14357 - DNA, 209 bp, Rattus norvegicus; identical to SEQ ID NO: 14110
  ref <308>: DATABASE ACCESSION NUMBER: EMBL / L14002
  ref <309>: DATABASE ENTRY DATE: 2000-03-04

SEQ ID NO: 14358 - DNA, 597 bp, Rattus norvegicus
  ref <308>: DATABASE ACCESSION NUMBER: EMBL / L14322
  ref <309>: DATABASE ENTRY DATE: 2000-03-04
cagaagtccattagcagtagcctgtgtttttggcaggctggatcccatgcctcctgcaggtgttgaggatggacgaggtgttaaactgctactccggaaggcacatcaagggaccacccagacctaaatctgaaacaccaggtgattcagaaagccatttccttgacagagaaatgacagcctccctttttcttcacacagggggaaggctcctcctcagtcttgtcggaaagttgccatgaggatccctctgttccccccaactttactccccccaaccctcaagctctcaagtggtgagcaccgtccttctagccaggtaggactgggtgggagggcccttttgagagaagggtggtatgtggccatgcctgtgcgggcagcgtggcttgctgtccggtcctcaccctccttcctccacagtcccttgtgtttcctgtggagtttttggcacatctagaatgttggctttttgtaaccccggggccagggaatcctagcagcagccggcgcgccgcgatggtcacgtgggacatatatgagggcagacatacactgaggtcaaatacccaaacatcataaagatgaagacaaaaa

SEQ ID NO: 14359 - protein, 1216 aa, Rattus norvegicus
  ref <308>: DATABASE ACCESSION NUMBER: SWISS-Prot / P10687
  ref <309>: DATABASE ENTRY DATE: 2002-06-15
MAGAQPGVHALQLKPVCVSDSLKKGTKFVKWDDDSTIVTPIILRTDPQGFFFYWTDQNKETELLDLSLVKDARCGKHAKAPKDPKLRELLDVGNIGHLEQRMITVVYGPDLVNISHLNLVAFQEEVAKEWTNEVFSLATNLLAQNMSRDAFLEKAYTKLKLQVTPEGRIPLKNIYRLFSADRKRVETALEACSLPSSRNDSIPQEDFTPDVYRVFLNNLCPRPEIDNIFSEFGAKSKPYLTVDQMMDFINLKQRDPRLNEILYPPLKQEQVQVLIEKYEPNSSLAKKGQMSVDGFMRYLSGEENGVVSPEKLDLNEDMSQPLSHYFINSSHNTYLTAGQLAGNSSVEMYRQVLLSGCRCVELDCWKGRTAEEEPVITHGFTMTTEISFKEVIEAIAECAFKTSPFPILLSFENHVDSPKQQAKMAEYCRLIFGDALLMEPLEKYPLESGVPLPSPMDLMYKILVKNKKKSHKSSEGSGKKKLSEQASNTYSDSSSVFEPSSPGAGEADTESDDDDDDDDCKKSSMDEGTAGSEAMATEEMSNLVNYIQPVKFESFETSKKRNKSFEMSSFVETKGLEQLTKSPVEFVEYNKMQLSRIYPKGTRVDSSNYMPQLFWNAGCQMVALNFQTVDLAMQINMGMYEYNGKSGYRLKPEFMRRPDKHFDPFTEGIVDGIVANTLSVKIISGQFLSDKKVGTYVEVDMFGLPVDTRRKAFKTKTSQGNAVNPVWEEEPIVFKKVVLPSLACLRIAAYEEGGKFIGHRILPVQAIRPGYHYICLRNERNQPLMLPAVFVYIEVKDYVPDTYADVIEALSNPIRYVNLMEQRAKQLAALTLEDEEEVKKEADPGETSSEAPSETRTTPAENGVNHTATLAPKPPSQAPHSQPAPGSVKAPAKTEDLIQSVLTEVEAQTIEELKQQKSFVKLQKKHYKEMKDLVKRHHKKTTELIKEHTTKYNEIQNDYLRRRAALEKSAKKDSKKKSEPSSPDHGSSAIEQDLAALDAEMTQKLIDLKDKQQQQLLNLRQEQYYSEKYQKREHIKLLIQKLTDVAEECQNNQLKKLKEICEKEKKELKKKMDKKRQEKITEAKSKDKSQMEEEKTEMIRSYIQEVVQYIKRLEEAQSKRQEKLVEKHKEIRQQILDEKPKLQMELEQEYQDKFKRLPLEILEFVQEAMKGKVSEDSNHGSAPPSLASDPAKVNLKSPSSEEVQGENAGREFDTPL

SEQ ID NO: 14360 - DNA, 6282 bp, Homo sapiens
  ref <308>: DATABASE ACCESSION NUMBER: EMBL / AB011153
  ref <309>: DATABASE ENTRY DATE: 2002-05-12
acctgctggcccaaaacatgtccagggatgcatttctggaaaaagcctatactaaacttaagctgcaagtcactccagaagggcgtattcctctcaaaaacatatatcgcttgttttcagcagatcggaagcgagttgaaactgctttagaggcttgtagtcttccatcttcaaggaatgattcaatacctcaagaagatttcactccagaagtgtacagagttttcctcaacaacctttgccctcgacctgaaattgataacatcttttcagaatttggtgcaaaaagcaaaccatatcttaccgttgatcagatgatggattttatcaaccttaagcagcgagatcctcggcttaatgaaatactttatccacctctaaaacaagagcaagtccaagtattgattgagaagtatgaacccaacaacagcctcgccagaaaaggacaaatatcagtggatgggttcatgcgctatctgagtggagaagaaaacggagtcgtttcacctgagaaactggatttgaatgaagacatgtctcagcccctttctcactatttcattaattcctcgcacaacacctacctcacagctggccaactggctggaaactcctctgttgagatgtatcgccaagtgctcctgtctggttgtcgctgtgtggagctggactgctggaagggacggactgcagaagaggaacctgtcatcacccatggcttcaccatgacaactgaaatatctttcaaggaagtgatagaagcaattgcggagtgtgcatttaagacttcaccttttccaattctcctttcgtttgagaaccatgtggattccccaaagcagcaagccaagatggcggagtactgccgactgatctttggggatgcccttctcatggagcccctggaaaaatatccactggaatctggagttcctcttccaagccctatggatttaatgtataaaattttggtgaaaaataagaagaaatcacacaagtcatcagaaggaagcggcaaaaagaagctctcagaacaagcctccaacacctacagtgactcctccagcatgttcgagccctcatccccaggagccggagaagctgatacggaaagtgacgacgacgatgatgatgatgactgtaaaaaatcttcaatggatgaggggactgctggaagtgaggctatggccacagaagaaatgtctaatctggtgaactatattcagccagtcaagtttgagtcatttgaaatttcaaaaaaaagaaataaaagttttgaaatgtcttccttcgtggaaaccaaaggacttgaacaactcaccaagtctccagtggaatttgtagaatataacaaaatgcagcttagcaggatatatccaaaaggaacacgtgtggattcatccaactatatgcctcagctcttctggaatgcaggttgtcagatggtggcacttaatttccagacaatggacctggctatgcaaataaatatggggatgtatgaatacaacgggaagagtggctacagattgaagccagagttcatgaggaggcctgacaagcattttgatccatttactgaaggcatcgtagatgggatagtggcaaacactttgtctgttaagattatttcaggtcagtttctttctgataagaaagttgggacttacgtggaagtagatatgtttggtttgcctgtggatacaaggaggaaggcatttaagaccaaaacatcccaaggaaatgctgtgaatcctgtctgggaagaagaacctattgtgttcaaaaaggtggttctttctactctggcctgtttgagaatagcagtttatgaagaaggaggtaaattcattggccaccgtatcttgccagtgcaagccattcggccaggctatcactatatctgtctaaggaatgaaaggaaccagcctctgacgctgcctgctgtctttgtctacatagaagtgaaagactatgtgccagacacatatgcagatgtcatcgaagctttatcaaacccaatccgatatgtgaacctgatggaacagagagctaagcaattggctgctttgacactggaagatgaagaagaagtaaagaaagaggctgatcctggagaaacaccatcagaggctccaagtgaagcgagaacgactccagcagaaaatggggtgaatcacactacaaccctgacacccaagccaccctcccaggctctccacagccagccagctccaggttctgtaaaggcacctgccaaaacagaagatcttattcagagtgtcttaacagaagtggaagcacagaccatcgaagaactaaagcaacagaaatcgtttgtgaaacttcaaaagaaacactacaaagaaatgaaagacctggttaagagacaccacaagaaaaccactgaccttatcaaagaacacactaccaagtataatgaaattcagaatgactacttgagaaggagagccgctttggaaaagtccgccaaaaaggacagtaagaaaaaatcggaacccagcagccctgatcatggttcatcaacgattgagcaagacctcgctgctctggatgctgaaatgacccaaaagttaatagacttgaaggacaaacaacagcagcagctgcttaatcttcggcaagaacagtattatagtgaaaaataccagaagcgagaacatattaaactgcttattcaaaagttgacggatgtcgcagaagagtgtcagaacaatcagttaaagaagctcaaagaaatctgtgagaaagaaaagaaagaattaaagaagaaaatggataaaaagaggcaggagaagataacagaagctaaatccaaagacaaaagtcagatggaagaggagaagacagagatgatccggtcatatatccaggaagtggtgcagtatatcaagaggctagaagaagcgcaaagtaaacggcaagaaaaactcgtagagaaacacaaggaaatacgtcagcagatcctggatgaaaagcccaagctgcaggtggagctggagcaagaataccaagacaaattcaaaagactgcccctcgagattttggaattcgtgcaggaagccatgaaaggaaagatcagtgaagacagcaatcacggttctgcccctctctccctgtcctcagaccctggaaaagtgaaccacaagactccctccagtgaggagctgggaggagacatcccaggaaaagaatttgatactcctctgtgaatgctcctgccaggccttcagaaattgcatggccactccagcgtcatcggactctctcttattacaaagatcactgcccaggaccatcttcccgagaagcatcccttagcctaaaatccacaccaaagggagagttccagaggaatccatgaagaattcccatgcccaggctccatgtgtcatgtggaaacctccacaggtctgctagtgaagaatgcatgtatgtgagatttttgttttctttccaatagcaaattcaaagcaagcaacttgcaggctccatggaacttttaatgaaggacagtgtcttctttgaagaaaatcaagctcgtgtttttattcgaagctctggtgtaaaatatttcaaagtcatagaaatagtttgagaaatgcatagcattatttaacactattgaacagccgactttgagcattgtttcttctaactgcccctcaactaccattatcttcaagtcaacatgcatattacattttcatcctttgctttgcaagcactggtggcttgcagtttgctaatttatttatcatagagtcatcaatgtatttgttgctgacatggttttattagatactgtagtgattcaaataagttttctatttgaaaaaaaaaatcacttgattgtatccttgcccagtgaagccatcctaagacttagcaatatggattgtacatttggctgcatgagcaagtcggccgcacacttccagacagtgtgctgtttgaattgactatttgcactcaaagtctgggtattcattggttattggcctgaaatgatcaaataactacaaatgatctgttgaataaaaatagttgagctgatatatgttaagcagatattcaatcagaatgaacaggttccggtggttattttgccgtttgacattttttatggttcatttatttttaatatagagaggaagattgaatatttatctagagaatacaaagacccacatgtaaatgataggtattatctccatgtatatatgtacccacttagtcatgtaagtgcatatacacatacacacacatgagtgtagacatgtgtttattaattgacaatgacccaaatctcttccacaagacttaaaaccaaattcagggacaaatggatagagaagaaaagggtcaaacatcgagattacatggatgttaaattatatggagacgctaagaaataattgatggagccattgatgcaaaccgaagtagatttagaacttatatgaatttgatttatattttgcaagatcaaaaattagatgttaagtatcagattttaagcttgttttaatggtcaaaaaattaggacagaaataatatggacatttattagtatcttccataatttttaagtctgacacatttctattttattctaacataaaaaaacttccattatatatttactaagtatatttaattcacttaactctgtctttataagttcctattttagatggaataagagaaacaaattatatcaaggtaaaactgatcaaaagcataattgaaagttctgaaaaaagaaaaataataatatgtagaaaaatgtaacttagagagtaacacatgaacattgaagttaaaacccagaagccagatgctcacagttttattttaccttaaaataaacctgtctgactgtagctttgtgaaatatcttaaaacgcaaaaaccaattgtgtcctgaaaattgtttcaagaatttaatatttttatgaaaattattttatttaactttaagcaataactagagattacaattaaattttaatcaaaatgaaggcttagttcaaacataaggaaacagtgtttgattaaaaaaaacacatctagtaagacgtaaggggaaaatcacatcctctttggagatgattatattttgatctgaagggtttggggtgttcattagacacttaataaaacttaacttccaatgaaaaagaaatcttttgtaaatcattctacttttgcactttgaaagaaaggcgttaatcataaagaagcaagaatggtcaaaatcgaatgctgcatttttataaacaaaattacagactgtctgaaattgaagaagaatgaactaataatagcattcataaccaaacacaatgatgattattgcagaacattgtatcacattttagtccagagatagaataaagttgaataaccttgacttacacaaaactgttttggtagttggatttcattatcttagtgaatttagtcattttacaatatgtttgtatttggccatttactgtaatcacatttttatatctgtacaatgacactttttgcagttgtggggtagtgtgtaacactgtccatcttgcatcattgaaactactacaatgatactatcatttaataatattaatattacttgaaatagactaagataaagaaaaggggtctgtatgatgtgcagttttgtgcctttatgtatttgccttgttctttgtcgaatgtgtgaaattccgtactgtggtttttcctataatagaaagtagagctgtgtattaaattagactgtgtctctctgatacctttacactactgagaatagcatggttttggccatgtaaaccaattttcaaagttctaatgacatagccatgtgtttttggttttttatatttcattttaaaatttgagtatcaccatacattaattaatactcctgtagtagataagctgtcattaagtaattcccaaaaaaagggccatttgcttgcattactttgaatttaatgttgcgcttgtgcactgtgttaatattgtttgtgatggattggacgttgtgactcttgccttttaagaagaaaaaaaagataggacaaagtatttgaagctcttaaaatgtacatattttggttcttctatctcaaattatttaaaatgcataattcacatttttgtaataattctatgcaattttgtggcatgatgtttcttccacttgtaattttatgtgctttcatcacaaatccaaaggaaagaataaaaatttcttaacac

SEQ ID NO: 14361 - DNA, 1215 bp, Rattus norvegicus; identical to SEQ ID NO: 12740
  ref <308>: DATABASE ACCESSION NUMBER: EMBL / L32601
  ref <309>: DATABASE ENTRY DATE: 2000-03-04

SEQ ID NO: 14362 - protein, 323 aa, Rattus norvegicus; identical to SEQ ID NO: 2376
  ref <308>: DATABASE ACCESSION NUMBER: SWISS-Prot / P51652
  ref <309>: DATABASE ENTRY DATE: 2002-06-15

SEQ ID NO: 14363 - DNA, 1204 bp, Homo sapiens; identical to SEQ ID NO: 2377
  ref <308>: DATABASE ACCESSION NUMBER: EMBL / D17793
  ref <309>: DATABASE ENTRY DATE: 2002-05-29

SEQ ID NO: 14364 - protein, 323 aa, Homo sapiens; identical to SEQ ID NO: 2378
  ref <308>: DATABASE ACCESSION NUMBER: SWISS-Prot / P42330
  ref <309>: DATABASE ENTRY DATE: 2002-06-15

SEQ ID NO: 14365 - DNA, 1750 bp, Rattus norvegicus; identical to SEQ ID NO: 2234
  ref <308>: DATABASE ACCESSION NUMBER: EMBL / D86373
  ref <309>: DATABASE ENTRY DATE: 1998-06-17

SEQ ID NO: 14366 - protein, 545 aa, Rattus norvegicus; identical to SEQ ID NO: 2235
  ref <308>: DATABASE ACCESSION NUMBER: SWISS-Prot / BAA25372
  ref <309>: DATABASE ENTRY DATE: 2001-10-16

SEQ ID NO: 14367 - DNA, 3017 bp, Rattus norvegicus
  ref <308>: DATABASE ACCESSION NUMBER: EMBL / L43592
  ref <309>: DATABASE ENTRY DATE: 2000-03-04
gtgattggacgtgtttttgtgactatttgggaagaagacaccttcctaatcagatttactccaatatcttcccggaccctcatgagtggattgcaattgacttgaagaagcagcaccctcaggactgaatctgaacaatggagacagcactagcaaaaataccacagcaaaggcaagtcttttttcttactatattgtcgttattgtggaagtctagctctgaggccattagatattccatgccagaagaaacagagagtggctatatggtggctaacctggcgaaagatctggggatcagggttggagaactgtcctctagaggagctcaaatccattacaaaggaaacaaagaacttttgcagctggatgcagagactgggaatttgttcttaaaggaaaaactagacagagaactgctgtgtggagagacagaaccctgtgtgctgaacttccagatcatactggaaaaccctatgcagttcttccaaactgaactgcagctcacagatataaacgaccattctccagagttccccaacaagaaaatgcttctaacaattcctgagagtgcccatccagggactgtgtttcctctgaaggcagctcgggactctgacatagggagcaacgctgttcagaactacacagtcaatcccaacctccatttccacgtcgttactcacagtcgcacagatggcaggaaatacccagagctggtgctggacagagccctggatagggaggagcagcctgagctcactttaatcctcactgctctggatggtggagctccttccaggtcaggaaccaccacagttcacatagaagttgtggacatcaatgataactccccccagtttgtacagtcactctataaggtgcaagttcctgagaataatcccctcaatgcctttgttgtcacggtctctgccacggatttagatgctggggtatatggcaatgtgacctattctctgtttcaagggtatggggtatttcaaccatttgtaatagacgaaatcactggagaaatccatctgagcaaagagctggattttgaggaaattagcaatcataacatagaaatcgcagccacagatggaggaggcctttcaggaaaatgcactgtggctgtacaggtgttggatgtgaatgacaacgccccagagttgacaattaggaagctcacagtcctggtcccagaaaattccgcagagactgtagttgctgtttttagtgtttctgattctgattcgggggacaatggaaggatggtgtgttctattccgaacaatatcccatttctcctgaaacccacatttgagaattattacacgttagtgactgaggggccacttgatagagagaacagagctgagtacaacatcaccatcacggtctcagatctgggcacacccaggctcacaacccagcacaccataacagtgcaagtgtccgacatcaacgacaacgcccctgccttcacccaaacctcctacaccatgtttgtccacgagaacaacagccccgccctgcacataggcaccatcagtgccacagactcagactcaggctccaatgcccacatcacctactcgctgctgccgcctgatgacccgcagctggccctcgactcactcatctccatcaatgttgacaatgggcagctgttcgcgctcagagctctagactatgaggcactgcagtccttcgagttctacgtgggcgctacagatggaggctcacccgcgctcagcagccagactctggtgcggatggtggtgctggatgacaatgacaatgcccccttcgtgctctacccactgcagaatgcctcagcaccctgtactgagctactgcctagggcagcagagcccggctacctgatcaccaaagtggtggctgtggatcgcgactctggacagaatgcttggctgtcgttccagctacttaaagctacagagccagggctgttcagtgtatgggcacacaatggtgaagtgcgcaccactaggctgctgagtgagcgagatgctcagaagcacaagctactgctgctggtcaaggacaatggcgatcctctgcgctctgccaatgtcactcttcacgtgctagtggtggatggcttctcgcagccttacctaccattggctgaggtggcacaggattccatgcaagataattacgacgttctcacactgtacctagtcattgccttggcatctgtatcttctctcttcctcttgtctgtagtgctgtttgtgggggtgaggctgtgcaggagggccagggaggcctccttgggtgactactctgtgcctgagggacactttcctagccacttggtggatgtcagcggtgccgggaccctgtcccagagttatcaatatgaggtgtgtcttaatggaggtactagaacaaatgagtttaactttcttaaaccattgtttcctatccttccgacccaggctgctgctgctgaagaaagagaaaacgctgttgtgcacaatagcgttggattctattagagcactgattttgaagtggtggttacctcatttttccttaactatccctgatgtagaatggtgtagtgccgtgaatcaactcctgagatatatgttcattttatcctttgttttgaatcaaactattcagatgtgatcctactctagagaatttggttctactccattgtgtttgtttagatttctacgccataccagtgcatgctgggttgtttttttttttacaattattataactttgctttggaggggaactcatattcgctgtaacgaattggaaccactttcattgttagagatgccttgctttgttgtgttatttcagacagggtcttaaattgtagccctgggtgacctgaaatgactatgtacagactgactttgaatttgtggcagtccatctgcctctgttgtcctatgttgggattgtgagcatgcatgagtaggctcagctgtggtgagcgaccttaataaaaatcaaatact

SEQ ID NO: 14368 - protein, 798 aa, Rattus norvegicus
  misc_feature (1)..(798): Xaa=Unknown amino acid
METALAKIPQQRQVFFLTILSLLWKSSSEAIRYSMPEETESGYMVANLAKDLGIRVGELSSRGAQIHYKGNKELLQLDAETGNLFLKEKLDRELLCGETEPCVLNFQIILENPMQFFQTELQLTDINDHSPEFPNKKMLLTIPESAHPGTVFPLKAARDSDIGSNAVQNYTVNPNLHFHVVTHSRTDGRKYPELVLDRALDREEQPELTLILTALDGGAPSRSGTTTVHIEVVDINDNSPQFVQSLYKVQVPENNPLNAFVVTVSATDLDAGVYGNVTYSLFQGYGVFQPFVIDEITGEIHLSKELDFEEISNHNIEIAATDGGGLSGKCTVAVQVLDVNDNAPELTIRKLTVLVPENSAETVVAVFSVSDSDSGDNGRMVCSIPNNIPFLLKPTFENYYTLVTEGPLDRENRAEYNITITVSDLGTPRLTTQHTITVQVSDINDNAPAFTQTSYTMFVHENNSPALHIGTISATDSDSGSNAHITYSLLPPDDPQLALDSLISINVDNGQLFALRALDYEALQSFEFYVGATDGGSPALSSQTLVRMVVLDDNDNAPFVLYPLQNASAPCTELLPRAAEPGYLITKVVAVDRDSGQNAWLSFQLLKATEPGLFSVWAHNGEVRTTRLLSERDAQKHKLLLLVKDNGDPLRSANVTLHVLVVDGFSQPYLPLAEVAQDSMQDNYDVLTLYLVIALASVSSLFLLSVVLFVGVRLCRRAREASLGDYSVPEGHFPSHLVDVSGAGTLSQSYQYEVCLNGGTRTNEFNFLKPLFPILPTQAAAAEERENAVVHNSVGFYX

SEQ ID NO: 14369 - DNA, 2388 bp, Homo sapiens
  ref <308>: DATABASE ACCESSION NUMBER: EMBL / AF152498
  ref <309>: DATABASE ENTRY DATE: 1999-07-14
atggagactgcgctagcaaaaacgccacagaaaaggcaagttatgtttcttgctatattgttgcttttgtgggaggctggctctgaggcagttaggtattccataccagaagaaacagaaagtggctattctgtggccaacctggcaaaagacctgggtcttggggtgggggaactggccactcggggcgcgcgaatgcattacaaaggaaacaaagagctcttgcagcttgatataaagaccggcaatttgcttctatatgaaaaactagaccgggaggtgatgtgcggggcgacagaaccctgtatattgcatttccagctcttactagaaaatccagtgcagttttttcaaactgatctgcagctcacagatataaatgaccatgccccagagttcccagagaaggaaatgctcctaaaaatcccagagagcacccagccagggactgtgtttcccttaaaaatagcccaggactttgacataggtagcaacactgttcagaactacacaatcagcccaaattcacactttcatgttgctacgcataatcgcggagatggcagaaaatacccagagctggtgctggacaaagcgctggaccgggaggagcggcctgagctcagcttaacactcactgcactggacggtggggctccgcccaggtccgggaccaccacaattcgcattgtcgtcttggataataatgacaacgcccccgaatttttacaatcattctatgaggtacaggtgcccgagaacagcccccttaactccttagttgtcgttgtctccgctcgagatttagatgcaggagcatatgggagtgtagcctatgctctattccaaggcgatgaagttactcaaccatttgtaatagacgagaaaacagcagaaattcgcctgaaaagggcattggatttcgaggcaactccatattataacgtggaaattgtagccacagatggtgggggcctttcaggaaaatgcactgtggctatagaagtggtggatgtgaatgacaacgcccctgaactcaccatgtctacgctctccagccctaccccagaaaatgccccggaaactgtagttgccgttttcagtgtttctgatccagactccggggacaacggtaggatgatttgctccatccagaatgatctcccctttcttttgaagcccacattaaaaaacttttacaccctagtgacacagagaacactggacagagagagccaagccgagtacaacatcaccatcactgtcaccgacatggggacacccaggctgaaaaccgagcacaacataacggtcctggtctccgacgtcaatgacaacgcccccgccttcacccaaacctcctacaccctgttcgtccgagagaacaacagccccgccctgcacatcggcagtgtcagcgccacagacagagactcaggcaccaacgcccaggtcacctactcgctgctgccgccccagaacccacacctgcgcctcgcctccctggtctccatcaacgcggacaacggccacctgtttgccctcaggtcgctggactacgaggccctgcaggcgttcgagttccgcgtgggagccacagaccgcggctccccggcgctgagcagcgaggcgctggtgcgcgtgctggtgctggacgccaacgacaactcgcccttcgtgctgtatccgctgcagaacggctcggcgccttgcaccgagctggtgccccgggcggccgagccgggctacctggtgaccaaggtggtggcggtggacggcgactcgggccagaacgcctggctgtcgtaccagctgctcaaggccacggagcccgggctgttcagcatgtgggcgcacaatggcgaggtgcgcaccgccaggctgctgagcgagcgcgacgcggccaagcacaggctggtggtgctggtcaaggacaatggcgagcctccgcgctcggccaccgccacgctgcacgtgctcctggtggacggcttctcccagccctacctgccgctgccggaggcggccccggcccaggcccaggccgactcgctcactgtctacctggtggtggcattggcctcggtgtcgtcgctcttcctcttttcggtgctcctgttcgtggcagtgcggctgtgcaggaggagcagggcggcctcggtcggtcgctgctcggtgcccgagggcccctttccagggcatctggtggacgtgagcggcaccgggaccctatcccagagctaccactacgaggtgtgtttgaccggagactcaggggccggcgagttcaagttcctgaagccgattattcctaaccttttgccccagggcgctggtgaagaaatagggaaaactgctgccttccggaatagctttggattaaattag

SEQ ID NO: 14370 - protein, 796 aa, Homo sapiens
  misc_feature (1)..(796): Xaa=Unknown amino acid
METALAKTPQKRQVMFLAILLLLWEAGSEAVRYSIPEETESGYSVANLAKDLGLGVGELATRGARMHYKGNKELLQLDIKTGNLLLYEKLDREVMCGATEPCILHFQLLLENPVQFFQTDLQLTDINDHAPEFPEKEMLLKIPESTQPGTVFPLKIAQDFDIGSNTVQNYTISPNSHFHVATHNRGDGRKYPELVLDKALDREERPELSLTLTALDGGAPPRSGTTTIRIVVLDNNDNAPEFLQSFYEVQVPENSPLNSLVVVVSARDLDAGAYGSVAYALFQGDEVTQPFVIDEKTAEIRLKRALDFEATPYYNVEIVATDGGGLSGKCTVAIEVVDVNDNAPELTMSTLSSPTPENAPETVVAVFSVSDPDSGDNGRMICSIQNDLPFLLKPTLKNFYTLVTQRTLDRESQAEYNITITVTDMGTPRLKTEHNITVLVSDVNDNAPAFTQTSYTLFVRENNSPALHIGSVSATDRDSGTNAQVTYSLLPPQNPHLRLASLVSINADNGHLFALRSLDYEALQAFEFRVGATDRGSPALSSEALVRVLVLDANDNSPFVLYPLQNGSAPCTELVPRAAEPGYLVTKVVAVDGDSGQNAWLSYQLLKATEPGLFSMWAHNGEVRTARLLSERDAAKHRLVVLVKDNGEPPRSATATLHVLLVDGFSQPYLPLPEAAPAQAQADSLTVYLVVALASVSSLFLFSVLLFVAVRLCRRSRAASVGRCSVPEGPFPGHLVDVSGTGTLSQSYHYEVCLTGDSGAGEFKFLKPIIPNLLPQGAGEEIGKTAAFRNSFGLNX

SEQ ID NO: 14371 - DNA, 1161 bp, Rattus norvegicus
  ref <308>: DATABASE ACCESSION NUMBER: EMBL / M18530
  ref <309>: DATABASE ENTRY DATE: 2000-03-04
ggccacaccaaaggaagccatagagagactgatatcagagtattcttggaagaggcaggagaaaatgaaagccaatctctgctcctaccttacatgtttgtgttaggggtgtcagataaactggtctggtatctctgtctgatgcatggaactattgtagctgaagaagaacatagtttcagggaagaaaggcaatagaaggaaggctctgaatagcttcaaagggtcagacccaatttactttctaaagtagctagggactagggaataactcaaaacccacaagactgtatacatgtgtcctggcttcattgttcctaatctgtagggataagtgtgcttttctgtgtgtctgtctataacatgcataatgcactgaaagggagattttccttgttacttcataccatctctgtgcttccttcctcaggggctgatgctgcaccaactgtatccatcttcccaccatcctcggagcagttagcagctggaggtgcctcagtcgtgtgcttcgtaaacaacttctatcccaaagacatcagtgtcaagtggaagattgatggcagtgaacgacaaaatgatgtcctgaacagtgttactgatcaggacagcaaagacagcacgtacagcatgagcagcaccctcacgttgaccaaggctgactatgaaagtcataacctctttgtctgtgaggttgttcataagacatcagcctcccccgtcgtcaagagcttcaacaggaatgagtgttagacccaaaggtcctgaggtgccacctgctccccagatccttccaatcttccctcctaaggtcttggagacttccccacaagcgacctaccactgttgcggtgctccaaacctcctccccacctcatcctccttcctttccttggctttgatcatgctaatatttggggaatattaaataaagtgaatctttgcacttgagatctttgtctttcttactaaatagtggttaacagttatttatcctgttacctggtttctcttctaaagaagttaaatgtttagttgccctgaaatccaccacacttaaacaacaaataaaactctcccccttgccctacttggttgtccactacattgcagtcctctctaaggttcacaagtactattcatggcttatttctctgggcc

SEQ ID NO: 14372 - protein, 107 aa, Rattus norvegicus
  misc_feature (1)..(107): Xaa=Unknown amino acid
ADAAPTVSIFPPSSEQLAAGGASVVCFVNNFYPKDISVKWKIDGSERQNDVLNSVTDQDSKDSTYSMSSTLTLTKADYESHNLFVCEVVHKTSASPVVKSFNRNECX

SEQ ID NO: 14373 - DNA, 998 bp, Homo sapiens; identical to SEQ ID NO: 3410
  ref <308>: DATABASE ACCESSION NUMBER: EMBL / S65921
  ref <309>: DATABASE ENTRY DATE: 2000-03-04

SEQ ID NO: 14374 - protein, 237 aa, Homo sapiens; identical to SEQ ID NO: 3411
  misc_feature (1)..(237): Xaa=Unknown amino acid

SEQ ID NO: 14375 - DNA, 1110 bp, Rattus norvegicus; identical to SEQ ID NO: 12787
  ref <308>: DATABASE ACCESSION NUMBER: EMBL / M18853
  ref <309>: DATABASE ENTRY DATE: 2000-03-04

SEQ ID NO: 14376 - DNA, 1080 bp, Homo sapiens; identical to SEQ ID NO: 12788
  ref <308>: DATABASE ACCESSION NUMBER: EMBL / M15565
  ref <309>: DATABASE ENTRY DATE: 2000-03-04

SEQ ID NO: 14377 - protein, 281 aa, Homo sapiens
  misc_feature (1)..(281): Xaa=Unknown amino acid
MAMLLGASVLILWLQPDWVNSQQKNDDQQVKQNSPSLSVQEGRISILNCDYTNSMFDYFLWYKKYPAEGPTFLISISSIKDKNEDGRFTVFLNKSAKHLSLHIVPSQPGDSAVYFCAAKGAGTASKLTFGTGTRLQVTLDIQNPDPAVYQLRDSKSSDKSVCLFTDFDSQTNVSQSKDSDVYITDKTVLDMRSMDFKSNSAVAWSNKSDFACANAFNNSIIPEDTFFPSPESSCDVKLVEKSFETDTNLNFQNLSVIGFRILLLKVAGFNLLMTLRLWSSX

SEQ ID NO: 14378 - DNA, 1179 bp, Rattus norvegicus
  ref <308>: DATABASE ACCESSION NUMBER: EMBL / M21622
  ref <309>: DATABASE ENTRY DATE: 2000-03-04
attatagacagatgccaatggaggaggctagaggaaagagagctcctgctccacatgatcattaaagctccagggatgtgggtcccattcccattccgatcccagagctctggcatcgaggcacactggggacagacactaacttaacctttattgattttgcagctctgggtgtcatgctaacagccactcagaaatctgtagtgtccttggacccaccgtggattagaatacttacaggagataaagtgactcttatatgcaatgggaacaattcctctcaaatgaactctactaaatggatccacaatgatagcatctctaatgtgaaatcgtcacattgggtcattgtgagtgccaccattcaagacagtggaaaatacatatgtcagaagcaaggattttataagagcaaacctgtgtacttgaacgtgatgcaagagtggctgctgctccaatcttctgctgacgtggtcttagacaatggatcctttgacatcagatgccgtagctggaagaaatggaaagtccacaaggtgatctactacaaggacgacattgctttcaagtactcttatgacagcaacaacatctccattagaaaggccacatttaatgacagtggcagctaccactgcacaggctatttgaacaaggttgaatgtaaatctgataaattcagtattgctgtagtaaaagattacacaattgagtatcgttggctacaactcattttcccatcattggcggtgattctgtttgctgtggacactgggttatggttctcaacccacaaacagttcgaatccatcttgaagattcagaagactggaaaaggcaaaaaaaaaggttgaaacctaactcttaaccaaggtatataaaggaactaatgtcatcgcttaagagacaattcttaacaattatttcccacagtatcttcaatagcctttcaactgtcaaaggacactcatgttatccatagaaatgtctgtaccccaggaattgcataaatgcttcattaaaccaacagcagctggttaagtgacatgcaataaataacaaatactcaataaacactggtttaagaagttaaagaatgagctgattgctttgtctatatctgtaaaagagaagtacaatttgaataaagtatggaatcatgtagaatggtacttttac

SEQ ID NO: 14379 - protein, 157 aa, Rattus norvegicus
  ref <308>: DATABASE ACCESSION NUMBER: SWISS-Prot / P12840
  ref <309>: DATABASE ENTRY DATE: 1999-07-15
MDTGGSARLCLALVLISLGVMLTATQKSVVSLDPPWIRILTGDKVTLICNGNNSSQMNSTKWIHNDSISNVKSSHWVIVSATIQDSGKYICQKQGFYKSKPVYLNVMQEWLLLQSSADVVLDNGSFDIRCRSWKKWKVHKITQLSIVGYNSFSHHWR

SEQ ID NO: 14380 - DNA, 1198 bp, Homo sapiens
  ref <308>: DATABASE ACCESSION NUMBER: EMBL / X06948
  ref <309>: DATABASE ENTRY DATE: 1995-03-21
tactaagagtctccagcatcctccacctgtctaccaccgagcatgggcctatatttgaagccttagatctctccagcacagtaagcaccaggagtccatgaagaagatggctcctgccatggaatcccctactctactgtgtgtagccttactgttcttcgctccagatggcgtgttagcagtccctcagaaacctaaggtctccttgaaccctccatggaatagaatatttaaaggagagaatgtgactcttacatgtaatgggaacaatttctttgaagtcagttccaccaaatggttccacaatggcagcctttcagaagagacaaattcaagtttgaatattgtgaatgccaaatttgaagacagtggagaatacaaatgtcagcaccaacaagttaatgagagtgaacctgtgtacctggaagtcttcagtgactggctgctccttcaggcctctgctgaggtggtgatggagggccagcccctcttcctcaggtgccatggttggaggaactgggatgtgtacaaggtgatctattataaggatggtgaagctctcaagtactggtatgagaaccacaacatctccattacaaatgccacagttgaagacagtggaacctactactgtacgggcaaagtgtggcagctggactatgagtctgagcccctcaacattactgtaataaaagctccgcgtgagaagtactggctacaattttttatcccattgttggtggtgattctgtttgctgtggacacaggattatttatctcaactcagcagcaggtcacatttctcttgaagattaagagaaccaggaaaggcttcagacttctgaacccacatcctaagccaaaccccaaaaacaactgatataattactcaagaaatatttgcaacattagtttttttccagcatcagcaattgctactcaattgtcaaacacagcttgcaatatacatagaaacgtctgtgctcaaggatttatagaaatgcttcattaaactgagtgaaactggttaagtggcatgtaatagtaagtgctcaattaacattggttgaataaatgagagaatgaatagattcatttattagcatttgtaaaagagatgttcaatttcaataaaataaatataaaaccatgtaacagaatgcttctgagtaaaaaaaaaaaaaaaaaaaaaaaaaaa

SEQ ID NO: 14381 - protein, 257 aa, Homo sapiens
  ref <308>: DATABASE ACCESSION NUMBER: SWISS-Prot / P12319
  ref <309>: DATABASE ENTRY DATE: 2002-06-15
MAPAMESPTLLCVALLFFAPDGVLAVPQKPKVSLNPPWNRIFKGENVTLTCNGNNFFEVSSTKWFHNGSLSEETNSSLNIVNAKFEDSGEYKCQHQQVNESEPVYLEVFSDWLLLQASAEVVMEGQPLFLRCHGWRNWDVYKVIYYKDGEALKYWYENHNISITNATVEDSGTYYCTGKVWQLDYESEPLNITVIKAPREKYWLQFFIPLLVVILFAVDTGLFISTQQQVTFLLKIKRTRKGFRLLNPHPKPNPKNN

SEQ ID NO: 14382 - DNA, 405 bp, Rattus norvegicus
  ref <308>: DATABASE ACCESSION NUMBER: EMBL / M21842
  ref <309>: DATABASE ENTRY DATE: 2000-03-04
aaatatagagtggccctgagcaggcttcctcagcagattcatgattatctgaatgcatctgactgggagagacaagtagctggtgccaaggaaaaattaacttctttcatggaaaactatagaattacagataatgatgtactaattgccttagatagtgccaaaatcaacttgaatgaaaaactctctcaacttgagacatacgcgatataatttgatcagtatattagagataattatgatgcacaggacttaaaaagaactattgctcagattattgatagaatcattgaaaagctaaaaatgcttgacgaacagtatcatatccgtgtaaatctagcaaaatcaatccataatctctatttatttgttgaaaatgttgatcttaaccaaatcagtagtagt

SEQ ID NO: 14383 - DNA, 14112 bp, Homo sapiens
  ref <308>: DATABASE ACCESSION NUMBER: EMBL / X04714
  ref <309>: DATABASE ENTRY DATE: 1997-06-13
attcccaccgggacctgcggggctgagtgcccttctcggttgctgccgctgaggagcccgcccagccagccagggccgcgaggccgaggccaggccgcagcccaggagccgccccaccgcagctggcgatggacccgccgaggcccgcgctgctggcgctgcctgcgctgctgctgctgctgctggcgggcgccagggccgaagaggaaatgctggaaaatgtcagcctggtctgtccaaaagatgcgacccgattcaagcacctccggaagtacacatacaactatgaggctgagagttccagtggagtccctgggactgctgattcaagaagtgccaccaggatcaactgcaaggttgagctggaggttccccagctctgcagcttcatcctgaagaccagccagtgcaccctgaaagaggtgtatggcttcaaccctgagggcaaagccttgctgaagaaaaccaagaactctgaggagtttgctgcagccatgtccaggtatgagctcaagctggccattccagaagggaagcaggttttcctttacccggagaaagatgaacctacttacatcctgaacatcaagaggggcatcatttctgccctcctggttcccccagagacagaagaagccaagcaagtgttgtttctggataccgtgtatggaaactgctccactcactttaccgtcaagacgaggaagggcaatgtggcaacagaaatatccactgaaagagacctgggccagtgtgatcgcttcaagcccatccgcacaggcatcagcccacttgctctcatcaaaggcatgacccgccccttgtcaactctgatcagcagcagccagtcctgtcagtacacactggacgctaagaggaagcatgtggcagaagccatctgcaaggagcaacacctcttcctgcctttctcctacaagaataagtatgggatggtagcacaagtgacacagactttgaaacttgaagacacaccaaagatcaacagccgcttctttggtgaaggtactaagaagatgggcctcgcatttgagagcaccaaatccacatcacctccaaagcaggccgaagctgttttgaagactctccaggaactgaaaaaactaaccatctctgagcaaaatatccagagagctaatctcttcaataagctggttactgagctgagaggcctcagtgatgaagcagtcacatctctcttgccacagctgattgaggtgtccagccccatcactttacaagccttggttcagtgtggacagcctcagtgctccactcacatcctccagtggctgaaacgtgtgcatgccaacccccttctgatagatgtggtcacctacctggtggccctgatccccgagccctcagcacagcagctgcgagagatcttcaacatggcgagggatcagcgcagccgagccaccttgtatgcgctgagccacgcggtcaacaactatcataagacaaaccctacagggacccaggagctgctggacattgctaattacctgatggaacagattcaagatgactgcactggggatgaagattacacctatttgattctgcgggtcattggaaatatgggccaaaccatggagcagttaactccagaactcaagtcttcaatcctgaaatgtgtccaaagtacaaagccatcactgatgatccagaaagctgccatccaggctctgcggaaaatggagcctaaagacaaggaccaggaggttcttcttcagactttccttgatgatgcttctccgggagataagcgactggctgcctatcttatgttgatgaggagtccttcacaggcagatattaacaaaattgtccaaattctaccatgggaacagaatgagcaagtgaagaactttgtggcttcccatattgccaatatcttgaactcagaagaattggatatccaagatctgaaaaagttagtgaaagaagttctgaaagaatctcaacttccaactgtcatggacttcagaaaattctctcggaactatcaactctacaaatctgtttctcttccatcacttgacccagcctcagccaaaatagaagggaatcttatatttgatccaaataactaccttcctaaagaaagcatgctgaaaactaccctcactgcctttggatttgcttcagctgacctcatcgagattggcttggaaggaaaaggctttgagccaacattggaagctctttttgggaagcaaggatttttcccagacagtgtcaacaaagctttgtactgggttaatggtcaagttcctgatggtgtctctaaggtcttagtggaccactttggctataccaaagatgataaacatgagcaggatatggtaaatggaataatgctcagtgttgagaagctgattaaagatttgaaatccaaagaagtcccggaagccagagcctacctccgcatcttgggagaggagcttggttttgccagtctccatgacctccagctcctgggaaagctgcttctgatgggtgcccgcactctgcaggggatcccccagatgattggagaggtcatcaggaagggctcaaagaatgacttttttcttcactacatcttcatggagaatgcctttgaactccccactggagctggattacagttgcaaatatcttcatctggagtcattgctcccggagccaaggctggagtaaaactggaagtagccaacatgcaggctgaactggtggcaaaaccctccgtgtctgtggagtttgtgacaaatatgggcatcatcattccggacttcgctaggagtggggtccagatgaacaccaacttcttccacgagtcgggtctggaggctcatgttgccctaaaagctgggaagctgaagtttatcattccttccccaaagagaccagtcaagctgctcagtggaggcaacacattacatttggtctctaccaccaaaacggaggtgatcccacctctcattgagaacaggcagtcctggtcagtttgcaagcaagtctttcctggcctgaattactgcacctcaggcgcttactccaacgccagctccacagactccgcctcctactatccgctgaccggggacaccagattagagctggaactgaggcctacaggagagattgagcagtattctgtcagcgcaacctatgagctccagagagaggacagagccttggtggataccctgaagtttgtaactcaagcagaaggtgcgaagcagactgaggctaccatgacattcaaatataatcggcagagtatgaccttgtccagtgaagtccaaattccggattttgatgttgacctcggaacaatcctcagagttaatgatgaatctactgagggcaaaacgtcttacagactcaccctggacattcagaacaagaaaattactgaggtcgccctcatgggcgacctaagttgtgacacaaaggaagaaagaaaaatcaagggtgttatttccataccccgtttgcaagcagaagccagaagtgagatcctcgcccactggtcgcctgccaaactgcttctccaaatggactcatctgctacagcttatggctccacagtttccaagagggtggcatggcattatgatgaagagaagattgaatttgaatggaacacaggcaccaatgtagataccaaaaaaatgacttccaatttccctgtggatctctccgattatcctaagagcttgcatatgtatgctaatagactcctggatcacagagtccctcaaacagacatgactttccggcacgtgggttccaaattaatagttgcaatgagctcatggcttcagaaggcatctgggagtcttccttatacccagactttgcaagaccacctcaatagcctgaaggagttcaacctccagaacatgggattgccagacttccacatcccagaaaacctcttcttaaaaagcgatggccgggtcaaatataccttgaacaagaacagtttgaaaattgagattcctttgccttttggtggcaaatcctccagagatctaaagatgttagagactgttaggacaccagccctccacttcaagtctgtgggattccatctgccatctcgagagttccaagtccctacttttaccattcccaagttgtatcaactgcaagtgcctctcctgggtgttctagacctctccacgaatgtctacagcaacttgtacaactggtccgcctcctacagtggtggcaacaccagcacagaccatttcagccttcgggctcgttaccacatgaaggctgactctgtggttgacctgctttcctacaatgtgcaaggatctggagaaacaacatatgaccacaagaatacgtctacactatcatgtgatgggtctctacgccacaaatttctagattcgaatatcaaattcagtcatgtagaaaaacttggaaacaacccagtctcaaaaggtttactaatattcgatgcatctagttcctggggaccacagatgtctgcttcagttcatttggactccaaaaagaaacagcatttgtttgtcaaagaagtcaagattgatgggcagttcagagtctcttcgttctatgctaaaggcacatatggcctgtcttgtcagagggatcctaacactggccggctcaatggagagtccaacctgaggtttaactcctcctacctccaaggcaccaaccagataacaggaagatatgaagatggaaccctctccctcacctccacctctgatctgcaaagtggcatcattaaaaatactgcttccctaaagtatgagaactacgagctgactttaaaatctgacaccaatgggaagtataagaactttgccacttctaacaagatggatatgaccttctctaagcaaaatgcactgctgcgttctgaatatcaggctgattacgagtcattgaggttcttcagcctgctttctggatcactaaattcccatggtcttgagttaaatgctgacatcttaggcactgacaaaattaatagtggtgctcacaaggcgacactaaggattggccaagatggaatatctaccagtgcaacgaccaacttgaagtgtagtctcctggtgctggagaatgagctgaatgcagagcttggcctctctggggcatctatgaaattaacaacaaatggccgcttcagggaacacaatgcaaaattcagtctggatgggaaagccgccctcacagagctatcactgggaagtgcttatcaggccatgattctgggtgtcgacagcaaaaacattttcaacttcaaggtcagtcaagaaggacttaagctctcaaatgacatgatgggctcatatgctgaaatgaaatttgaccacacaaacagtctgaacattgcaggcttatcactggacttctcttcaaaacttgacaacatttacagctctgacaagttttataagcaaactgttaatttacagctacagccctattctctggtaactactttaaacagtgacctgaaatacaatgctctggatctcaccaacaatgggaaactacggctagaacccctgaagctgcatgtggctggtaacctaaaaggagcctaccaaaataatgaaataaaacacatctatgccatctcttctgctgccttatcagcaagctataaagcagacactgttgctaaggttcagggtgtggagtttagccatcggctcaacacagacatcgctgggctggcttcagccattgacatgagcacaaactataattcagactcactgcatttcagcaatgtcttccgttctgtaatggccccgtttaccatgaccatcgatgcacatacaaatggcaatgggaaactcgctctctggggagaacatactgggcagctgtatagcaaattcctgttgaaagcagaacctctggcatttactttctctcatgattacaaaggctccacaagtcatcatctcgtgtctaggaaaagcatcagtgcagctcttgaacacaaagtcagtgccctgcttactccagctgagcagacaggcacctggaaactcaagacccaatttaacaacaatgaatacagccaggacttggatgcttacaacactaaagataaaattggcgtggagcttactggacgaactctggctgacctaactctactagactccccaattaaagtgccacttttactcagtgagcccatcaatatcattgatgctttagagatgagagatgccgttgagaagccccaagaatttacaattgttgcttttgtaaagtatgataaaaaccaagatgttcactccattaacctcccattttttgagaccttgcaagaatattttgagaggaatcgacaaaccattatagttgtactggaaaacgtacagagaaagctgaagcacatcaatattgatcaatttgtaagaaaatacagagcagccctgggaaaactcccacagcaagctaatgattatctgaattcattcaattgggagagacaagtttcacatgccaaggagaaactgactgctctcacaaaaaagtatagaattacagaaaatgatatacaaattgcattagatgatgccaaaatcaactttaatgaaaaactatctcaactgcagacatatatgatacaatttgatcagtatattaaagatagttatgatttacatgatttgaaaatagctattgctaatattattgatgaaatcattgaaaaattaaaaagtcttgatgagcactatcatatccgtgtaattttagtaaaaacaatccatgatctacatttgtttattgaaaatattgattttaacaaaagtggaagtagtactgcatcttggattcaaaatgtggatactaagtaccaaatcagaatccagatacaagaaaaactgcagcagcttaagagacacatacagaatatagacatccagcacctagctggaaagttaaaacaacacattgaggctattgatgttagagtgcttttagatcaattgggaactacaatttcatttgaaagaataaatgacgttcttgagcatgtcaaacactttgttataaatcttattggggattttgaagtagctgagaaaatcaatgccttcagagccaaagtccatgagttaatcgagaggtatgaagtagaccaacaaatccaggttttaatggataaattagtagagttggcccaccaatacaagttgaaggagactattcagaagctaagcaatgtcctacaacaagttaagataaaagattactttgagaaattagttggatttattgatgatgctgtcaagaagcttaatgaattatcttttaaaacattcattgaagatgttaacaaattccttgacatgttgataaagaaattaaagtcatttgattaccaccagtttgtagatgaaaccaatgacaaaatccgtgaggtgactcagagactcaatggtgaaattcaggctctggaactaccacaaaaagctgaagcattaaaactgtttttagaggaaaccaaggccacagttgcagtgtatctggaaagcctacaggacaccaaaataaccttaatcatcaattggttacaggaggctttaagttcagcatctttggctcacatgaaggccaaattccgagagaccctagaagatacacgagaccgaatgtatcaaatggacattcagcaggaacttcaacgatacctgtctctggtcagccaggtttatagcacacttgtcacctacatttctgattggtggactcttgctgctaagaaccttactgactttgcagagcaatattctatccaagattgggctaaacgtatgaaagcattggtagagcaagggttcactgttcctgaaatcaagaccatccttgggaccatgcctgcctttgaagtcagtcttcaggctcttcagaaagctaccttccagacacctgattttatagtccccctaacagatttgaggattccatcagttcagataaacttcaaagacttaaaaaatataaaaatcccatccaggttttccacaccagaatttaccatccttaacaccttccacattccttcctttacaattgactttgtagaaatgaaagtaaagatcatcagaaccattgaccagatgctgaacagtgagctgcagtggcccgttccagatatatatctcagggatctgaaggtggaggacattcctctagcgagaatcaccctgccagacttccgtttaccagaaatcgcaataccagaattcataatcccaactctcaaccttaatgattttcaagttcctgaccttcacataccagaattccagcttccccacatctcacacacaattgaagtacctacttttggcaagctatacagtattctgaaaatccaatctcctcttttcacattagatgcaaatgctgacatagggaatggaaccacctcagcaaacgaagcaggtatcgcagcttccatcactgccaaaggagagtccaaattagaagttctcaattttgattttcaagcaaatgcacaactctcaaaccctaagattaatccgctggctctgaaggagtcagtgaagttctccagcaagtacctgagaacggagcatgggagtgaaatgctgttttttggaaatgccattgagggaaaatcaaacacagtggcaagtttacacacagaaaaaaatacactggagcttagtaatggagtgattgtcaagataaacaatcagcttaccctggatagcaacactaaatacttccacaaattgaacatccccaaactggacttctctagtcaggctgacctgcgcaacgagatcaagacactgttgaaagctggccacatagcatggacttcttctggaaaagggtcatggaaatgggcctgccccagattctcagatgagggaacacatgaatcacaaattagtttcaccatagaaggacccctcacttcctttggactgtccaataagatcaatagcaaacacctaagagtaaaccaaaacttggtttatgaatctggctccctcaacttttctaaacttgaaattcaatcacaagtcgattcccagcatgtgggccacagtgttctaactgctaaaggcatggcactgtttggagaagggaaggcagagtttactgggaggcatgatgctcatttaaatggaaaggttattggaactttgaaaaattctcttttcttttcagcccagccatttgagatcacggcatccacaaacaatgaagggaatttgaaagttcgttttccattaaggttaacagggaagatagacttcctgaataactatgcactgtttctgagtcccagtgcccagcaagcaagttggcaagtaagtgctaggttcaatcagtataagtacaaccaaaatttctctgctggaaacaacgagaacattatggaggcccatgtaggaataaatggagaagcaaatctggatttcttaaacattcctttaacaattcctgaaatgcgtctaccttacacaataatcacaactcctccactgaaagatttctctctatgggaaaaaacaggcttgaaggaattcttgaaaacgacaaagcaatcatttgatttaagtgtaaaagctcagtataagaaaaacaaacacaggcattccatcacaaatcctttggctgtgctttgtgagtttatcagtcagagcatcaaatcctttgacaggcattttgaaaaaaacagaaacaatgcattagattttgtcaccaaatcctataatgaaacaaaaattaagtttgataagtacaaagctgaaaaatctcaggacgagctccccaggacctttcaaattcctggatacactgttccagttgtcaatgttgaagtgtctccattcaccatagagatgtcggcattcggctatgtgttcccaaaagcagtcagcatgcctagtttctccatcctaggttctgacgtccgtgtgccttcatacacattaatcctgccatcattagagctgccagtccttcatgtccctagaaatctcaagctttctcttccacatttcaaggaattgtgtaccataagccatatttttattcctgccatgggcaatattacctatgatttctcctttaaatcaagtgtcatcacactgaataccaatgctgaactttttaaccagtcagatattgttgctcatctcctttcttcatcttcatctgtcattgatgcactgcagtacaaattagagggcaccacaagattgacaagaaaaaggggattgaagttagccacagctctgtctctgagcaacaaatttgtggagggtagtcataacagtactgtgagcttaaccacgaaaaatatggaagtgtcagtggcaaaaaccacaaaagccgaaattccaattttgagaatgaatttcaagcaagaacttaatggaaataccaagtcaaaacctactgtctcttcctccatggaatttaagtatgatttcaattcttcaatgctgtactctaccgctaaaggagcagttgaccacaagcttagcttggaaagcctcacctcttacttttccattgagtcatctaccaaaggagatgtcaagggttcggttctttctcgggaatattcaggaactattgctagtgaggccaacacttacttgaattccaagagcacacggtcttcagtgaagctgcagggcacttccaaaattgatgatatctggaaccttgaagtaaaagaaaattttgctggagaagccacactccaacgcatatattccctctgggagcacagtacgaaaaaccacttacagctagagggcctctttttcaccaacggagaacatacaagcaaagccaccctggaactctctccatggcaaatgtcagctcttgttcaggtccatgcaagtcagcccagttccttccatgatttccctgaccttggccaggaagtggccctgaatgctaacactaagaaccagaagatcagatggaaaaatgaagtccggattcattctgggtctttccagagccaggtcgagctttccaatgaccaagaaaaggcacaccttgacattgcaggatccttagaaggacacctaaggttcctcaaaaatatcatcctaccagtctatgacaagagcttatgggatttcctaaagctggatgtaaccaccagcattggtaggagacagcatcttcgtgtttcaactgcctttgtgtacaccaaaaaccccaatggctattcattctccatccctgtaaaagttttggctgataaattcattactcctgggctgaaactaaatgatctaaattcagttcttgtcatgcctacgttccatgtcccatttacagatcttcaggttccatcgtgcaaacttgacttcagagaaatacaaatctataagaagctgagaacttcatcatttgccctcaacctaccaacactccccgaggtaaaattccctgaagttgatgtgttaacaaaatattctcaaccagaagactccttgattcccttttttgagataaccgtgcctgaatctcagttaactgtgtcccgattcacgcttccaaaaagtgtttcagatggcattgctgctttggatctaaatgcagtagccaacaagatcgcagactttgagttgcccaccatcatcgtgcctgagcagaccattgagattccctccattaagttctctgtacctgctggaattgtcattccttcctttcaagcactgactgcacgctttgaggtagactctcccgtgtataatgccacttggagtgccagtttgaaaaacaaagcagattatgttgaaacagtcctggattccacatgcagctcaaccgtacagttcctagaatatgaactaaatgttttgggaacacacaaaatcgaagatggtacgttagcctctaagactaaaggaacacttgcacaccgtgacttcagtgcagaatatgaagaagatggcaaatttgaaggacttcaggaatgggaaggaaaagcgcacctcaatatcaaaagcccagcgttcaccgatctccatctgcgctaccagaaagacaagaaaggcatctccacctcagcagcctccccagccgtaggcaccgtgggcatggatatggatgaagatgacgacttttctaaatggaacttctactacagccctcagtcctctccagataaaaaactcaccatattcaaaactgagttgagggtccgggaatctgatgaggaaactcagatcaaagttaattgggaagaagaggcagcttctggcttgctaacctctctgaaagacaacgtgcccaaggccacaggggtcctttatgattatgtcaacaagtaccactgggaacacacagggctcaccctgagagaagtgtcttcaaagctgagaagaaatctgcagaacaatgctgagtgggtttatcaaggggccattaggcaaattgatgatatcgacgtgaggttccagaaagcagccagtggcaccactgggacctaccaagagtggaaggacaaggcccagaatctgtaccaggaactgttgactcaggaaggccaagccagtttccagggactcaaggataacgtgtttgatggcttggtacgagttactcaaaaattccatatgaaagtcaagcatctgattgactcactcattgattttctgaacttccccagattccagtttccggggaaacctgggatatacactagggaggaactttgcactatgttcataagggaggtagggacggtactgtcccaggtatattcgaaagtccataatggttcagaaatactgttttcctatttccaagacctagtgattacacttcctttcgagttaaggaaacataaactaatagatgtaatctcgatgtatagggaactgttgaaagatttatcaaaagaagcccaagaggtatttaaagccattcagtctctcaagaccacagaggtgctacgtaatcttcaggaccttttacaattcattttccaactaatagaagataacattaaacagctgaaagagatgaaatttacttatcttattaattatatccaagatgagatcaacacaatcttcaatgattatatcccatatgtttttaaattgttgaaagaaaacctatgccttaatcttcataagttcaatgaatttattcaaaacgagcttcaggaagcttctcaagagttacagcagatccatcaatacattatggcccttcgtgaagaatattttgatccaagtatagttggctggacagtgaaatattatgaacttgaagaaaagatagtcagtctgatcaagaacctgttagttgctcttaaggacttccattctgaatatattgtcagtgcctctaactttacttcccaactctcaagtcaagttgagcaatttctgcacagaaatattcaggaatatcttagcatccttaccgatccagatggaaaagggaaagagaagattgcagagctttctgccactgctcaggaaataattaaaagccaggccattgcgacgaagaaaataatttctgattaccaccagcagtttagatataaactgcaagatttttcagaccaactctctgattactatgaaaaatttattgctgaatccaaaagattgattgacctgtccattcaaaactaccacacatttctgatatacatcacggagttactgaaaaagctgcaatcaaccacagtcatgaacccctacatgaagcttgctccaggagaacttactatcatcctctaattttttaaaagaaatcttcaatttattcttcttttccaattgaactttcacatagcacagaaaaaattcaaactgcctatattgataaaaccatacagtgagccagccttgcagtaggcagtagactataagcagaagcacatatgaactggacctgcaccaaagctggcaccagggctcggaaggtctctgaactcagaaggatggcattttttgcaagttaaagaaaatcaggatctgagttattttgctaaacttgggggaggaggaacaaataaatggagtctttattgtgtatcat

SEQ ID NO: 14384 - protein, 4561 aa, Homo sapiens
  misc_feature (1)..(4561): Xaa=Unknown amino acid
MDPPRPALLALPALLLLLLAGARAEEEMLENVSLVCPKDATRFKHLRKYTYNYEAESSSGVPGTADSRSATRINCKVELEVPQLCSFILKTSQCTLKEVYGFNPEGKALLKKTKNSEEFAAAMSRYELKLAIPEGKQVFLYPEKDEPTYILNIKRGIISALLVPPETEEAKQVLFLDTVYGNCSTHFTVKTRKGNVATEISTERDLGQCDRFKPIRTGISPLALIKGMTRPLSTLISSSQSCQYTLDAKRKHVAEAICKEQHLFLPFSYKNKYGMVAQVTQTLKLEDTPKINSRFFGEGTKKMGLAFESTKSTSPPKQAEAVLKTLQELKKLTISEQNIQRANLFNKLVTELRGLSDEAVTSLLPQLIEVSSPITLQALVQCGQPQCSTHILQWLKRVHANPLLIDVVTYLVALIPEPSAQQLREIFNMARDQRSRATLYALSHAVNNYHKTNPTGTQELLDIANYLMEQIQDDCTGDEDYTYLILRVIGNMGQTMEQLTPELKSSILKCVQSTKPSLMIQKAAIQALRKMEPKDKDQEVLLQTFLDDASPGDKRLAAYLMLMRSPSQADINKIVQILPWEQNEQVKNFVASHIANILNSEELDIQDLKKLVKEVLKESQLPTVMDFRKFSRNYQLYKSVSLPSLDPASAKIEGNLIFDPNNYLPKESMLKTTLTAFGFASADLIEIGLEGKGFEPTLEALFGKQGFFPDSVNKALYWVNGQVPDGVSKVLVDHFGYTKDDKHEQDMVNGIMLSVEKLIKDLKSKEVPEARAYLRILGEELGFASLHDLQLLGKLLLMGARTLQGIPQMIGEVIRKGSKNDFFLHYIFMENAFELPTGAGLQLQISSSGVIAPGAKAGVKLEVANMQAELVAKPSVSVEFVTNMGIIIPDFARSGVQMNTNFFHESGLEAHVALKAGKLKFIIPSPKRPVKLLSGGNTLHLVSTTKTEVIPPLIENRQSWSVCKQVFPGLNYCTSGAYSNASSTDSASYYPLTGDTRLELELRPTGEIEQYSVSATYELQREDRALVDTLKFVTQAEGAKQTEATMTFKYNRQSMTLSSEVQIPDFDVDLGTILRVNDESTEGKTSYRLTLDIQNKKITEVALMGDLSCDTKEERKIKGVISIPRLQAEARSEILAHWSPAKLLLQMDSSATAYGSTVSKRVAWHYDEEKIEFEWNTGTNVDTKKMTSNFPVDLSDYPKSLHMYANRLLDHRVPQTDMTFRHVGSKLIVAMSSWLQKASGSLPYTQTLQDHLNSLKEFNLQNMGLPDFHIPENLFLKSDGRVKYTLNKNSLKIEIPLPFGGKSSRDLKMLETVRTPALHFKSVGFHLPSREFQVPTFTIPKLYQLQVPLLGVLDLSTNVYSNLYNWSASYSGGNTSTDHFSLRARYHMKADSVVDLLSYNVQGSGETTYDHKNTSTLSCDGSLRHKFLDSNIKFSHVEKLGNNPVSKGLLIFDASSSWGPQMSASVHLDSKKKQHLFVKEVKIDGQFRVSSFYAKGTYGLSCQRDPNTGRLNGESNLRFNSSYLQGTNQITGRYEDGTLSLTSTSDLQSGIIKNTASLKYENYELTLKSDTNGKYKNFATSNKMDMTFSKQNALLRSEYQADYESLRFFSLLSGSLNSHGLELNADILGTDKINSGAHKATLRIGQDGISTSATTNLKCSLLVLENELNAELGLSGASMKLTTNGRFREHNAKFSLDGKAALTELSLGSAYQAMILGVDSKNIFNFKVSQEGLKLSNDMMGSYAEMKFDHTNSLNIAGLSLDFSSKLDNIYSSDKFYKQTVNLQLQPYSLVTTLNSDLKYNALDLTNNGKLRLEPLKLHVAGNLKGAYQNNEIKHIYAISSAALSASYKADTVAKVQGVEFSHRLNTDIAGLASAIDMSTNYNSDSLHFSNVFRSVMAPFTMTIDAHTNGNGKLALWGEHTGQLYSKFLLKAEPLAFTFSHDYKGSTSHHLVSRKSISAALEHKVSALLTPAEQTGTWKLKTQFNNNEYSQDLDAYNTKDKIGVELTGRTLADLTLLDSPIKVPLLLSEPINIIDALEMRDAVEKPQEFTIVAFVKYDKNQDVHSINLPFFETLQEYFERNRQTIIVVLENVQRKLKHINIDQFVRKYRAALGKLPQQANDYLNSFNWERQVSHAKEKLTALTKKYRITENDIQIALDDAKINFNEKLSQLQTYMIQFDQYIKDSYDLHDLKIAIANIIDEIIEKLKSLDEHYHIRVILVKTIHDLHLFIENIDFNKSGSSTASWIQNVDTKYQIRIQIQEKLQQLKRHIQNIDIQHLAGKLKQHIEAIDVRVLLDQLGTTISFERINDVLEHVKHFVINLIGDFEVAEKINAFRAKVHELIERYEVDQQIQVLMDKLVELAHQYKLKETIQKLSNVLQQVKIKDYFEKLVGFIDDAVKKLNELSFKTFIEDVNKFLDMLIKKLKSFDYHQFVDETNDKIREVTQRLNGEIQALELPQKAEALKLFLEETKATVAVYLESLQDTKITLIINWLQEALSSASLAHMKAKFRETLEDTRDRMYQMDIQQELQRYLSLVSQVYSTLVTYISDWWTLAAKNLTDFAEQYSIQDWAKRMKALVEQGFTVPEIKTILGTMPAFEVSLQALQKATFQTPDFIVPLTDLRIPSVQINFKDLKNIKIPSRFSTPEFTILNTFHIPSFTIDFVEMKVKIIRTIDQMLNSELQWPVPDIYLRDLKVEDIPLARITLPDFRLPEIAIPEFIIPTLNLNDFQVPDLHIPEFQLPHISHTIEVPTFGKLYSILKIQSPLFTLDANADIGNGTTSANEAGIAASITAKGESKLEVLNFDFQANAQLSNPKINPLALKESVKFSSKYLRTEHGSEMLFFGNAIEGKSNTVASLHTEKNTLELSNGVIVKINNQLTLDSNTKYFHKLNIPKLDFSSQADLRNEIKTLLKAGHIAWTSSGKGSWKWACPRFSDEGTHESQISFTIEGPLTSFGLSNKINSKHLRVNQNLVYESGSLNFSKLEIQSQVDSQHVGHSVLTAKGMALFGEGKAEFTGRHDAHLNGKVIGTLKNSLFFSAQPFEITASTNNEGNLKVRFPLRLTGKIDFLNNYALFLSPSAQQASWQVSARFNQYKYNQNFSAGNNENIMEAHVGINGEANLDFLNIPLTIPEMRLPYTIITTPPLKDFSLWEKTGLKEFLKTTKQSFDLSVKAQYKKNKHRHSITNPLAVLCEFISQSIKSFDRHFEKNRNNALDFVTKSYNETKIKFDKYKAEKSQDELPRTFQIPGYTVPVVNVEVSPFTIEMSAFGYVFPKAVSMPSFSILGSDVRVPSYTLILPSLELPVLHVPRNLKLSLPHFKELCTISHIFIPAMGNITYDFSFKSSVITLNTNAELFNQSDIVAHLLSSSSSVIDALQYKLEGTTRLTRKRGLKLATALSLSNKFVEGSHNSTVSLTTKNMEVSVAKTTKAEIPILRMNFKQELNGNTKSKPTVSSSMEFKYDFNSSMLYSTAKGAVDHKLSLESLTSYFSIESSTKGDVKGSVLSREYSGTIASEANTYLNSKSTRSSVKLQGTSKIDDIWNLEVKENFAGEATLQRIYSLWEHSTKNHLQLEGLFFTNGEHTSKATLELSPWQMSALVQVHASQPSSFHDFPDLGQEVALNANTKNQKIRWKNEVRIHSGSFQSQVELSNDQEKAHLDIAGSLEGHLRFLKNIILPVYDKSLWDFLKLDVTTSIGRRQHLRVSTAFVYTKNPNGYSFSIPVKVLADKFITPGLKLNDLNSVLVMPTFHVPFTDLQVPSCKLDFREIQIYKKLRTSSFALNLPTLPEVKFPEVDVLTKYSQPEDSLIPFFEITVPESQLTVSRFTLPKSVSDGIAALDLNAVANKIADFELPTIIVPEQTIEIPSIKFSVPAGIVIPSFQALTARFEVDSPVYNATWSASLKNKADYVETVLDSTCSSTVQFLEYELNVLGTHKIEDGTLASKTKGTLAHRDFSAEYEEDGKFEGLQEWEGKAHLNIKSPAFTDLHLRYQKDKKGISTSAASPAVGTVGMDMDEDDDFSKWNFYYSPQSSPDKKLTIFKTELRVRESDEETQIKVNWEEEAASGLLTSLKDNVPKATGVLYDYVNKYHWEHTGLTLREVSSKLRRNLQNNAEWVYQGAIRQIDDIDVRFQKAASGTTGTYQEWKDKAQNLYQELLTQEGQASFQGLKDNVFDGLVRVTQKFHMKVKHLIDSLIDFLNFPRFQFPGKPGIYTREELCTMFIREVGTVLSQVYSKVHNGSEILFSYFQDLVITLPFELRKHKLIDVISMYRELLKDLSKEAQEVFKAIQSLKTTEVLRNLQDLLQFIFQLIEDNIKQLKEMKFTYLINYIQDEINTIFNDYIPYVFKLLKENLCLNLHKFNEFIQNELQEASQELQQIHQYIMALREEYFDPSIVGWTVKYYELEEKIVSLIKNLLVALKDFHSEYIVSASNFTSQLSSQVEQFLHRNIQEYLSILTDPDGKGKEKIAELSATAQEIIKSQAIATKKIISDYHQQFRYKLQDFSDQLSDYYEKFIAESKRLIDLSIQNYHTFLIYITELLKKLQSTTVMNPYMKLAPGELTIILX

SEQ ID NO: 14385 - DNA, 601 bp, Rattus norvegicus
  ref <308>: DATABASE ACCESSION NUMBER: EMBL / M25157
  ref <309>: DATABASE ENTRY DATE: 2000-03-04
ggcggcttctctcgtctccttgctttttgcgccgcgcgtctcccggggaagcatggcgatgaaggccgtgtgcgtgctgaagggcgacggtccggtgcagggcgtcattcacttcgagcagaaggcaagtggtgaaccagtggtggtgtcaggacagattacaggattaactgaaggcgagcatgggttccatgtccatcaatatggagacaatacacaaggctgtaccactgcaggacctcattttaatcctcactctaagaaacatggcggtccagcggatgaagagaggcatgttggagacctgggcaatgtggctgctggaaaggacggtgtggccaatgtgtccattgaagatcgtgtgatctcactctcaggagagcattccatcattggccgtactatggtggtccacgagaaacaagatgacttgggcaaaggtggaaatgaagaaagtacaaagactggaaatgctggaagccgcttggcttgtggtgtgattgggattgcccaataaacattccctatgtggtctgagtctcagactcatctgctggcctgctaactgtagaaaaaaaccaaaccattaaactgtaatctt

SEQ ID NO: 14386 - protein, 153 aa, Rattus norvegicus; identical to SEQ ID NO: 14013
  ref <308>: DATABASE ACCESSION NUMBER: SWISS-Prot / P07632
  ref <309>: DATABASE ENTRY DATE: 2002-06-15

SEQ ID NO: 14387 - DNA, 560 bp, Homo sapiens; identical to SEQ ID NO: 14014
  ref <308>: DATABASE ACCESSION NUMBER: EMBL / K00065
  ref <309>: DATABASE ENTRY DATE: 1995-01-28

SEQ ID NO: 14388 - protein, 153 aa, Homo sapiens
  ref <308>: DATABASE ACCESSION NUMBER: SWISS-Prot / DSHUCZ
  ref <309>: DATABASE ENTRY DATE: 2002-06-15
ATKAVCVLKGDGPVQGIINFEQKESNGPVKVWGSIKGLTEGLHGFHVHEFGDNTAGCTSAGPHFNPLSRKHGGPKDEERHVGDLGNVTADKDGVADVSIEDSVISLSGDHCIIGRTLVVHEKADDLGKGGNEESTKTGNAGSRLACGVIGIAQ

SEQ ID NO: 14389 - DNA, 1620 bp, Rattus norvegicus
  ref <308>: DATABASE ACCESSION NUMBER: EMBL / M33201
  ref <309>: DATABASE ENTRY DATE: 2000-03-04
cagatatccacacagcctgcaggtctgtatgtggaagccactggggatagtagccatgtcactgtgttctttggccttcaccctcttcttgactgttgtcgctggtatcaagtgcaatgtgacagacgtttgtgctggaagccctgggatccctggagctcctggaaaccatggtctgcctggcagagacgggagagacggtgtcaaaggagaccctggacctccaggtcccatgggccctcctggaggaatgccaggtcttcctggacgcgatgggctgcccggaggacctggtgcacctggaggacgtggagacaagggagagcctggagaaaggggcctgccaggatttccagcttacctggatgaggagctccagactgaactctatgagatcaaacatcagattctgcaaacaatgggagtcctcagcttgcaaggatccatgctgtcagtgggggataaagtcttttccaccaatgggcagtcagtcaactttgataccattaaagagatgtgtaccagagcaggaggcaacattgctgtcccgaggactcctgaggagaacgaggccattgcaagtattgcgaagaagtacaacaactatgtctacttgggcatgattgaagaccagactcctggagacttccactacctggatggggcttctgtgaactacaccaactggtacccaggagaacccaggggtcagggcaaagaaaagtgtgtagaaatgtatacagatgggacatggaatgataggggctgcctgcagtaccggctggctgtttgtgaattttgatcaagcaattagacgaaaagatgaaccctcacactgcctctatcctgatgattcatctggtctgtaaaaccctgcaactacctttacttgtggccttcagtaattagaagcatcttttgtcacccccgctcccacatagttcccaaacacttctccatattcattagcaatcctgagtgtttccctagagtcccatctgagcgttcattcaaggtagccattgtaaaccttggccttgaccatgagatggatagatacttcctttttcctcactttatccagtcttcatttataaatggtggccatgaagacccagcatggaaggaccctctaactaagtgctgccctctgacctttccacccttctgtagctcggtgtcccaggatttagaagtccaggttaaacataggggatttctgggaaagcctagtatgtgggtgcaggccacattcatgccatctgtatccatggctttcaaggcaaacattgtctctaagaagccagagaaccaggagaaccaggtaggaccaggtagtactgggggaacataaactcacttggtttggcatgtatggctcctccttgggtctggaggtgccatcttgaccttgaactaacagcagccaccctgggttttgagagaacgaccttcccagcccagaccccaactcaagtaatttcctgctaacagacacagcctcagttcactttacatcactgaggcattcatgatacgaactgcaatctgttttctcctctcgtgagttcaatcagctattcattaaagtcaactgcattcaaaaaaaaaaaaaaaaaa

SEQ ID NO: 14390 - protein, 249 aa, Rattus norvegicus
  misc_feature (1)..(249): Xaa=Unknown amino acid
MSLCSLAFTLFLTVVAGIKCNVTDVCAGSPGIPGAPGNHGLPGRDGRDGVKGDPGPPGPMGPPGGMPGLPGRDGLPGGPGAPGGRGDKGEPGERGLPGFPAYLDEELQTELYEIKHQILQTMGVLSLQGSMLSVGDKVFSTNGQSVNFDTIKEMCTRAGGNIAVPRTPEENEAIASIAKKYNNYVYLGMIEDQTPGDFHYLDGASVNYTNWYPGEPRGQGKEKCVEMYTDGTWNDRGCLQYRLAVCEFX

SEQ ID NO: 14391 - DNA, 935 bp, Homo sapiens
  misc_feature (1)..(935): n=a, c, g or t
  ref <308>: DATABASE ACCESSION NUMBER: EMBL / K03475
  ref <309>: DATABASE ENTRY DATE: 1999-07-02
cggagacccaagcacctggaggctctgtgtgtgggtcgctgantttcttggagcctgaaaagaaggagcagcgactggacccagagccatgtggctgtgccctctggccctcaccctcatcttgatggcagcctctggtgctgcgtgcgaagtgaaggacgtttgtgttggaagccctggtatccccggcactcctggatcccacggcctgccaggcagggacgggagagatggtgtcaaaggagaccctggccctccaggccccatgggtccgcctggagaaacaccatgtcctcctgggaataatgggctgcctggagcccctggtgtccctggagagcgtggagagaagggggagcctggcgagagaggccctccagggcttccagctcatctagatgaggagctccaagccacactccacgacttcagacatcaaatcctgcagacaaggggagccctcagtctgcagggctccataatgacagtaggagagaaggtcttctccagcaatgggcagtccatcacttttgatgccattcaggaggcatgtgccagagcaggcggccgcattgctgtcccaaggaatccagaggaaaatgaggccattgcaagcttcgtgaagaagtacaacacatatgcctatgtaggcctgactgagggtcccagccctggagacttccgctactcagatgggacccctgtaaactacaccaactggtaccgaggggagcctgcaggtcggggaaaagagcagtgtgtggagatgtacacagatgggcagtggaatgacaggaactgcctgtactcccgactgaccatctgtgagttctgagaggcatttaggccatgggacagggaggatcctgtctggccttcagtttccatccccaggatccacttggtctgtgagatgctagaactccctttcaaca

SEQ ID NO: 14392 - protein, 249 aa, Homo sapiens
  misc_feature (1)..(249): Xaa=Unknown amino acid
MWLCPLALTLILMAASGAACEVKDVCVGSPGIPGTPGSHGLPGRDGRDGVKGDPGPPGPMGPPGETPCPPGNNGLPGAPGVPGERGEKGEPGERGPPGLPAHLDEELQATLHDFRHQILQTRGALSLQGSIMTVGEKVFSSNGQSITFDAIQEACARAGGRIAVPRNPEENEAIASFVKKYNTYAYVGLTEGPSPGDFRYSDGTPVNYTNWYRGEPAGRGKEQCVEMYTDGQWNDRNCLYSRLTICEFX

SEQ ID NO: 14393 - DNA, 1004 bp, Rattus norvegicus; identical to SEQ ID NO: 12871
  ref <308>: DATABASE ACCESSION NUMBER: EMBL / M34134
  ref <309>: DATABASE ENTRY DATE: 2000-03-04

SEQ ID NO: 14394 - protein, 284 aa, Rattus norvegicus; identical to SEQ ID NO: 3319
  ref <308>: DATABASE ACCESSION NUMBER: SWISS-Prot / P18342
  ref <309>: DATABASE ENTRY DATE: 2002-06-15

SEQ ID NO: 14395 - DNA, 1111 bp, Homo sapiens; identical to SEQ ID NO: 12873
  ref <308>: DATABASE ACCESSION NUMBER: EMBL / M19713
  ref <309>: DATABASE ENTRY DATE: 2000-03-04

SEQ ID NO: 14396 - protein, 284 aa, Homo sapiens; identical to SEQ ID NO: 3321
  ref <308>: DATABASE ACCESSION NUMBER: SWISS-Prot / P09493
  ref <309>: DATABASE ENTRY DATE: 2002-06-15

SEQ ID NO: 14397 - DNA, 5946 bp, Rattus norvegicus
  ref <308>: DATABASE ACCESSION NUMBER: EMBL / M34384
  ref <309>: DATABASE ENTRY DATE: 2000-03-04
tgctggagttctccgcttccgctgggtcactgtcgccgctacttcttttcaacccctaaaagctccacgggccactcccttctctagtgctccacgtccgcttgccctcgggggccagaccagcgacatggagggttgcgtcggggaagaatcttttcagatgtgggagctcaatcgacgcctggaggcctacctgacccgggtcaagacgctagaagagcaaaaccagctgctcagcgccgagcttgggggactccgggcgcagtccggagacacctcctggagagcccgagccgatgacgagctggcatccctgcggatcctcgtcgatcagcgctggcgggagaagctcgaggctgaggtgcagcgcgacaaccttgcggaagagctggagagcgtggcgggccggtgccagcaggtgcggcttgctcgggagcggaccgtccaggaggccgcctgcagccggcgcgcactcgaggcggagaagaatgcgcggggctggctgagcacccaggcggccgagctggagcgggagttagaggctctgcgagccgcgcacgaggaggagcgcgcacacctgaacgcccaggccgcctgtgcgcctcgccggccccccgcaccgccccaccggatccccggtccggcccccgaagtcgaggatctggccaggcgactaggcgaagtgtggcgcggggcggtgcgtgactaccaggagcgcgtggctcacatggaaagctcgctgggtcaggcacgcgagcggctgagccaagccgtgcggggcgctcgggagtgtcgcttagaggtgcaacagctgcaggctgatcgcgacagcctccaggagcgcagagaagcgctggaacagagattggaaggccgctggcaggaccggctgcaggccactgataagttccagctggctgtggaagccctggagcaggagaagcaaggtctacagagtcagatcgctcagatcctggaaggtgggcagcaactggcacacctcaagatgtcccttagtctggaggtggctacatacaggactctgctggaggctgagaactctcggttgcagacacctggacgaggttcccaggcttctcttggctttctggaccccaagctgaagccgaatttccttgggataccagaggaccagtacctgggatctgtgctccctgccctcagccccacatccttcccttcccccttgcctaatacccttgagactcctgtgacagccttcctgaagactcaggagttccttcaggccagaacccccaccttggccagcactcccatcccacctatatctgaggctccctgtcctccaaatgcagaggtgagagcccaggaggtccctctttctctgctccagacacaggctccagagcccctttggctgaaggccacagtgcctagttcttctgctatcctcccagaactagaggaacctgggggcaagcagcagggtcacttccctgatgatctgacctccttagccacaaacctcaaccctcaccaccctactttagaggctaaagatggagaatccagtgagtctagagtttctagcatattccaggaagatgaggggcaaatctgggaactggtagagaaagaagcagatatagaggtaaaagtagaaaacagctcagcccagaaaacacaagaaagtggtctggacacagaagaaacccaggattcccagggacctttgcagaaggaaacactgaaggctctaggagaggagccactgatgtctctgaaaatccagaactatgagacagcagggaaagagaattgcaattcttctacagaaggccacctgggaacactagaaggcccagaaaaagaaaagcaaataccactaaagtctttagaagaaaagaatgtagagtcagagaaaactctagaaaatggggttcctgtactatctgagcttttaggaaaagaagacacaagaacagaggatcaagaattaatgtctcctaaaggtacactaaagagattttcatctctaggaaaggaaagtcaagaagtagtgaggccttcaaaagaggggaacctagaatcatggacagcttttaaagaggagagccaacacccactgggatttccaggagctgaggaccagatgcttgagagactggtagagaaagaggatcagagcttcccaaggtctccagaggaagaggaccaggaggcatgtagacctctgcagaaagagaatcaggaaccactagggtatgaagaagcagagggccagatacttgagagactgatagaaaaagagagtcaggagtccctgaggtctccagaagaagaggaccaggaggcaggtagatctctgcagaaagagaatcaggagccactagggtatgaagaagcagaggaccagatgcttgagagactgatagaaaaagagagtcaggagtccctgaagtctccagaagaaaaccagaggattgggaagcctctagaaagagagaatcagaaatctctgaggtatcttgaagaaaaccaggagacttttgtaccactagaaagcaggaaccagaggccactgagatctctagaagtagaagaggaggagcagagaattgtgaaacctctagaaaaagtgagtcaggattccctcggatctctagcagaagagaatgtgcagccactgaggtatctggaagaagatgactgcataaataagagccttctagaagacaagactcacaagtccttggggtctcttgaagatagaaatggggatagcattattataccacaagaaagtgagacccaggtttcattgaggcctccagaagaggaggaccagaggattgtgaaccatctagaaaaagaaagtcaggagttctcgaggtcttcagaagaagaagagcaggtgatggagagatctctagaaggagagaaccatgaatcactgagttctgtagaaaaagaggaccagatggttgagagccaactagagaaagagagtcaggactcagggaagtctcttgaagatgagagccaggagacctttggacctctggaaaaagagaatgcagagtccctgagatctctagcaggacaggaccaagaggaacagaagcttgaacaagagacccaacaaacactgagggctgtagggaatgagcagatggcagtgagcccaccagaaaaggtggatccagagttaccgaagcctcttggaaatgaccaggaaatagctagatctcttggaaaagagaatcaagagtcactagtgtcactgaaagaaaaaggtatagagacagtgaagtctttagaaacagagatcatagaaccactggagactgcagaagaggacctggaaagaaggaagtctatagatactcaggagccattgtggtctactgaagtggctagagagacagtagaacctccagaagatgagcccccaggatcgctagggtctgtggatgagaaccgagagacactgacatcccttgaaaaggagagtcaagaactgagctctctgggcaagtggaacgtagagaccagggtagaggacagtcagcagtgcctgcaagtagaagagggtctgcaggaggaacagcaccaagagtctctgagagaggtgaagcaggagctgcctagctctggaaatcaacagcggtgggaggatgtggtggagggcaaagcagtgggtcaggaagcacctctggcaaccacaggagtgggaactgaggataaggcagagttgcatctgagggggcaaggtggagaggaagaagctgcagcagagggagagctgttgcaggatattgtgggggaggcctggagtctggggagctctgagcccaaggagcagagggtccctgctgaggccctcgacaacctggaaggaggggccttagaggtcccagttgctcagtcaatgccagaggtgacagagcgagatgaggatagagcccaagcaggtgaacaagactccatagaggtgacccttgggttagaggctgccagaactggactggaactcgagcaggaagtggtagggctagaggacccaaggcattttgccagggaggaggccattcccccatccctgggggaggaaagtgtgaaggcaaagatagctcagggcttggaagggcctggaaaggaaccaaaagaggcaggtgctctggactcggggatccttgaattgcccaagactagcagcgaggctctggaatgccagggccatgaagagtctgagtccatggagggctgggaagaagaggaggcctcactggagacttcagatcatgagggcagtgatgcccctcagcccaggcccccagaaacagaagaagatgagggtgcacaggcagcactgacagcccctggtcccaagctcttggaaccctgttcacccatcccaatcctgacagatgcccatgagctgcagccccaggctgaggggatccaggaggctggctggcagccagaagctgggtctgaagcactagaaagggtagaaaatgagccagagtttggtcttggggagatcccggagggcctccaggattgggaagagggcagagaagaaagcgaggcagatgatctaggggaaactctccctgactctactcccctgggcctctacctgaggtcccctgcttctccaaagtgggatctggctggagaacagaggctttcccctcaaggggatgccgggaaggaagactggggtcctgctgtccccgctgcccagggcctcagtggtccaccggaagaggaggaggagcaaggccatggctctgacctatcatctgaggagtttgaggacctagggactgaggcctctcttcttccaggggttcccaaggaggtggcagatcacgtgggccaagtgcccccggtactgcagcctgcatgctgggatcagggtggggaatctgatgggtttgctgatgaggaagaaagtggggaggagggagaggaagaagatgctgatgaggaaggagcagagtcaggagctcagtggtgggggtcaggggcctctggtggaggctgcaaggtccaggatattgcccaaagaggagacccggtacaggagtctgtgggtgtcagtggtctctgggatgatggcttgagaggtgctgcagctaatgttcctgccctagagatggtatctcaggacagtgctgagccttctgggtcagaggagtctgagtctgcttccttggagggggaggaaggtcaagtgactgaccatttagatgctccccaggaggtgaccagcatggtcccgggggtaggagatgcctttgacattggtggccagagccccaacttggactcagaacaagtgaatgggaaaatggagaatggactagaacaggctgaggggcaggtggtcctggatggggacgaggatcaagaactcctattacagggacaggaggtgggtgctctaaaggttcctttggtagcatctcctgtgcatctaggcccaagccagcccctgaagttcactctgagtggggtagatggggattcctggtcctcaggggaagactagaaactgcccctctggctctgaggatgtactggtggggatgtccctccctgctctgggtgaccactcttagctttgataacttgacccatggtatttgtcctggagagttgtggctgggctgagcaagggaggtgagatcctcctgaaggctcaggagttccaggcctatagttctaccccctctttcttctgtggctcacctgctggaagaggcctgggcccagagctttcccacaaggctgttctggccacagcttgctagccttgcctaccacctgcacaaggtctggtctggtgtatgaccaggggagctgagggcagcatttatctgacccttcatctcagcctgctgagagcttgttcctctcttcctccctgaataaagccgtatccctacctac

SEQ ID NO: 14398 - protein, 1805 aa, Rattus norvegicus
  ref <308>: DATABASE ACCESSION NUMBER: SWISS-Prot / P21263
  ref <309>: DATABASE ENTRY DATE: 2001-10-16
MEGCVGEESFQMWELNRRLEAYLTRVKTLEEQNQLLSAELGGLRAQSGDTSWRARADDELASLRILVDQRWREKLEAEVQRDNLAEELESVAGRCQQVRLARERTVQEAACSRRALEAEKNARGWLSTQAAELERELEALRAAHEEERAHLNAQAACAPRRPPAPPHRIPGPAPEVEDLARRLGEVWRGAVRDYQERVAHMESSLGQARERLSQAVRGARECRLEVQQLQADRDSLQERREALEQRLEGRWQDRLQATDKFQLAVEALEQEKQGLQSQIAQILEGGQQLAHLKMSLSLEVATYRTLLEAENSRLQTPGRGSQASLGFLDPKLKPNFLGIPEDQYLGSVLPALSPTSFPSPLPNTLETPVTAFLKTQEFLQARTPTLASTPIPPISEAPCPPNAEVRAQEVPLSLLQTQAPEPLWLKATVPSSSAILPELEEPGGKQQGHFPDDLTSLATNLNPHHPTLEAKDGESSESRVSSIFQEDEGQIWELVEKEADIEVKVENSSAQKTQESGLDTEETQDSQGPLQKETLKALGEEPLMSLKIQNYETAGKENCNSSTEGHLGTLEGPEKEKQIPLKSLEEKNVESEKTLENGVPVLSELLGKEDTRTEDQELMSPKGTLKRFSSLGKESQEVVRPSKEGNLESWTAFKEESQHPLGFPGAEDQMLERLVEKEDQSFPRSPEEEDQEACRPLQKENQEPLGYEEAEGQILERLIEKESQESLRSPEEEDQEAGRSLQKENQEPLGYEEAEDQMLERLIEKESQESLKSPEENQRIGKPLERENQKSLRYLEENQETFVPLESRNQRPLRSLEVEEEEQRIVKPLEKVSQDSLGSLAEENVQPLRYLEEDDCINKSLLEDKTHKSLGSLEDRNGDSIIIPQESETQVSLRPPEEEDQRIVNHLEKESQEFSRSSEEEEQVMERSLEGENHESLSSVEKEDQMVESQLEKESQDSGKSLEDESQETFGPLEKENAESLRSLAGQDQEEQKLEQETQQTLRAVGNEQMAVSPPEKVDPELPKPLGNDQEIARSLGKENQESLVSLKEKGIETVKSLETEIIEPLETAEEDLERRKSIDTQEPLWSTEVARETVEPPEDEPPGSLGSVDENRETLTSLEKESQELSSLGKWNVETRVEDSQQCLQVEEGLQEEQHQESLREVKQELPSSGNQQRWEDVVEGKAVGQEAPLATTGVGTEDKAELHLRGQGGEEEAAAEGELLQDIVGEAWSLGSSEPKEQRVPAEALDNLEGGALEVPVAQSMPEVTERDEDRAQAGEQDSIEVTLGLEAARTGLELEQEVVGLEDPRHFAREEAIPPSLGEESVKAKIAQGLEGPGKEPKEAGALDSGILELPKTSSEALECQGHEESESMEGWEEEEASLETSDHEGSDAPQPRPPETEEDEGAQAALTAPGPKLLEPCSPIPILTDAHELQPQAEGIQEAGWQPEAGSEALERVENEPEFGLGEIPEGLQDWEEGREESEADDLGETLPDSTPLGLYLRSPASPKWDLAGEQRLSPQGDAGKEDWGPAVPAAQGLSGPPEEEEEQGHGSDLSSEEFEDLGTEASLLPGVPKEVADHVGQVPPVLQPACWDQGGESDGFADEEESGEEGEEEDADEEGAESGAQWWGSGASGGGCKVQDIAQRGDPVQESVGVSGLWDDGLRGAAANVPALEMVSQDSAEPSGSEESESASLEGEEGQVTDHLDAPQEVTSMVPGVGDAFDIGGQSPNLDSEQVNGKMENGLEQAEGQVVLDGDEDQELLLQGQEVGALKVPLVASPVHLGPSQPLKFTLSGVDGDSWSSGED

SEQ ID NO: 14399 - DNA, 4854 bp, Homo sapiens
  ref <308>: DATABASE ACCESSION NUMBER: EMBL / X65964
  ref <309>: DATABASE ENTRY DATE: 1992-05-12
atggagggctgcatgggggaggagtcgtttcagatgtgggagctcaatcggcgcctggaggcctacctgggccgggtcaaggcgctggaggagcagaatgagctgctcagcgccggactcggggggctccggcgacaatccgcggacacctcctggcgggcgcatgccgacgacgagctggcggccctgcgtgcgctcgttgaccaacgctggcgggagaagcacgcggccgaggtggcgcgcgacaacctggctgaagagctggagggcgtggcaggccgatgcgagcagctgcggctggcccgggagcggacgacggaggaggtagcccgcaaccggcgcgccgtcgaggcagagaaatgcgcccgggcctggctgagtagccagggggcagagctggagcgcgagctagaggctctacgcgtggcgcacgaggaggagcgcgtcggtctgaacgcgcaggctgcctgtgccccccgcctgcccgcgccgccccggcctcccgcgccggccccggaggtagaggagctggcaaggcgactgggcgaggcgtggcgcggggcagtgcgcggctaccaggagcgcgtggcacacatggagacgtcgctggaccagacccgcgagcgcctggcccgggcggtgcagggtgcccgcgaggtccgcctggagctgcagcagctccaggctgagcgcggaggcctcctggagcgcagggcagcgttggaacagaggttggagggccgctggcaggagcggctgcgggctactgaaaagttccagctggctgtggaggccctggagcaggagaaacagggcctacagagccagatcgctcaggtcctggaaggtcggcagcagctggcgcacctcaagatgtccctcagcctggaggtggccacgtacaggaccctcctggaggctgagaactcccggctgcaaacacctggcggtggctccaagacttccctcagctttcaggaccccaagctggagctgcaattccctaggaccccagagggccggcgtcttggatctttgctcccagtcctgagcccaacttccctcccctcacccttgcctgctacccttgagacacctgtgccagcctttcttaagaaccaagaattcctccaggcccgtacccctaccttggccagcacccccatcccccccacacctcaggcaccctctcctgctgtagatgcagagatcagagcccaggatgctcctctctctctgctccagacacagggtgggaggaaacaggctccagagcccctgcgggctgaagccagggtggccattcctgccagcgtcctgcctggaccagaggagcctgggggccagcggcaagaggccagtacaggccagtccccagaggaccatgcctccttggcaccacccctcagccctgaccactccagtttagaggctaaggatggagaatccggtgggtctagagtgttcagcatatgccgaggggaaggtgaagggcaaatctgggggttggtagagaaagaaacagccatagagggcaaagtggtaagcagcttgcagcaggaaatatgggaagaagaggatctaaacaggaaggaaatccaggactcccaggttcctttggaaaaagaaaccctgaagtctctgggagaggagattcaagagtcactgaagactctggaaaaccagagccatgagacactagaaagggagaatcaagaatgtccgaggtctttagaagaagacttagaaacactaaaaagtctagaaaaggaaaataaaagagctattaaaggatgtggaggtagtgagacctctagaaaaagaggctgtaggcaacttaagcctacaggaaaagaggacacacagacattgcaatccctgcaaaaggagaatcaagaactaatgaaatctcttgaaggtaatctagagacatttttatttccaggaacggaaaatcaagaattagtaagttctctgcaagagaacttagagtcattgacagctctggaaaaggagaatcaagagccactgagatctccagaagtaggggatgaggaggcactgagacctctgacaaaggagaatcaggaacccctgaggtctcttgaagatgagaacaaagaggcctttagatctctagaaaaagagaaccaggagccactgaagactctagaagaagaggaccagagtattgtgagacctctagaaacagagaatcacaaatcactgaggtctttagaagaacaggaccaagagacattgagaactcttgaaaaagagactcaacagcgacggaggtctctaggggaacaggatcagatgacattaagacccccagaaaaagtggatctagaaccactgaagtctcttgaccaggagatagctagacctcttgaaaatgagaatcaagagttcttaaagtcactcaaagaagagagcgtagaggcagtaaaatctttagaaacagagatcctagaatcactgaagtctgcgggacaagagaacctggaaacactgaaatctccagaaactcaagcaccactgtggactccagaagaaataaataaatcagggggcaatgaatcctctagaaaaggaaattcaagaaccactggagtctgtggaagtgaaccaagagacattcagactcctggaagaggagaatcaggaatcattgagatctctgggagcatggaacctggagaatttgagatctccagaggagtagacaaggaaagtcaaaggaatctggaagaggaagagaacctgggaaagggagagtaccaagagtcactgaggtctctggaggaggagggacaggagctgccgcagtctgcagatgtgcagaggtgggaagatacggtggagaaggaccaagaactggctcaggaaagccctcctgggatggctggagtggaaaataaggatgaggcagagctgaatctaagggagcaggatggcttcactgggaaggaggaggtggtagagcagggagagctgaatgccacagaggaggtctggttcccaggcgaggggcacccagagaaccctgagcccaaagagcagagaggcctggttgagggagccagtgtgaagggaggggctgagggcctccaggaccctgaagggcaatcacaacaggtggggaccccaggcctccaggctccccaggggctgccagaggcgatagagcccctggtggaagatgatgtggccccagggggtgaccaagcctccccagaggtcatgttggggtcagagcctgccatgggtgagtctgctgcgggagctgagccaggcctggggcagggggtgggagggctgggggacccaggccatctgaccagggaagaggtgatggaaccacccctggaagaggagagtttggaggcaaagagggttcagggcttggaagggcctagaaaggacctagaggaggcaggtggtctggggacagagttctccgagctgcctgggaagagcagagacccttgggagcctcccagggagggtagggaggagtcagaggctgaggcccccaggggagcagaggaggcgttccctgctgagaccctgggccacactggaagtgatgccccttcaccttggcctctggggtcagaggaagctgaggaggatgtaccaccagtgctggtctcccccagcccaacgtacaccccgatcctggaagatgcccctgggctccagcctcaggctgaagggagtcaggaggctagctggggggtgcaggggagggctgaagctgggaaagtagagagcgagcaggaggagttgggttctggggagatccccgagggcctccaggaggaaggggaggagagcagagaagagagcgaggaggatgagctcggggagacccttccagactccactcccctgggcttctacctcaggtcccccacctcccccaggtggaccccactggagagcagaggccaccccctcaaggagactggaaaggagggctgggatcctgctgtcctggcttccgagggccttgaggaaccctcagaaaaggaggagggggaggagggagaagaggagtgtggccgtgactctgacctgtcagaagaatttgaggacctggggactgaggcaccttttcttcctggggtccctggggaggtggcagaacctctgggccaggtgccccagctgctactggatcctgcagcctgggatcgagatggggagtctgatgggtttgcagatgaggaagaaagtggggaggagggagaggaggatcaggaggaggggagggagccaggggctgggcggtgggggccagggtcttctgttggcagcctccaggccctgagtagctcccagagaggggaattcctggagtctgattctgtaagtgtcagcgtcccctgggatgacagcttgaggggtgcagtggctggtgcccccaagactgccctggaaacggagtcccaggacagtgctgagccttctggctcagaggaagagtctgaccctgtttccttggagagggaggacaaagtccctggccctctagagatccccagtgggatggaggatgcaggcccaggggcagacatcattggtgttaatggccagggtcccaacttggaggggaagtcacagcatgtaaatgggggagtaatgaacgggctggagcagtctgaggaaagtggggcaaggaatgcgctagtctctgagggagaccgagggagcccctttcaggaggaggaggggagtgctctgaagaggtcttcggcaggggctcctgttcacctgggccagggtcagttcctgaagttcactcagagggaaggagatagagagtcctggtcctcaggggaggac

SEQ ID NO: 14400 - protein, 1618 aa, Homo sapiens
  ref <308>: DATABASE ACCESSION NUMBER: SWISS-Prot / P48681
  ref <309>: DATABASE ENTRY DATE: 2002-06-15
MEGCMGEESFQMWELNRRLEAYLGRVKALEEQNELLSAGLGGLRRQSADTSWRAHADDELAALRALVDQRWREKHAAEVARDNLAEELEGVAGRCEQLRLARERTTEEVARNRRAVEAEKCARAWLSSQGAELERELEALRVAHEEERVGLNAQAACAPRLPAPPRPPAPAPEVEELARRLGEAWRGAVRGYQERVAHMETSLDQTRERLARAVQGAREVRLELQQLQAERGGLLERRAALEQRLEGRWQERLRATEKFQLAVEALEQEKQGLQSQIAQVLEGRQQLAHLKMSLSLEVATYRTLLEAENSRLQTPGGGSKTSLSFQDPKLELQFPRTPEGRRLGSLLPVLSPTSLPSPLPATLETPVPAFLKNQEFLQARTPTLASTPIPPTPQAPSPAVDAEIRAQDAPLSLLQTQGGRKQAPEPLRAEARVAIPASVLPGPEEPGGQRQEASTGQSPEDHASLAPPLSPDHSSLEAKDGESGGSRVFSICRGEGEGQIWGLVEKETAIEGKVVSSLQQEIWEEEDLNRKEIQDSQVPLEKETLKSLGEEIQESLKTLENQSHETLERENQECPRSLEEDLETLKSLEKENKRAIKGCGGSETSRKRGCRQLKPTGKEDTQTLQSLQKENQELMKSLEGNLETFLFPGTENQELVSSLQENLESLTALEKENQEPLRSPEVGDEEALRPLTKENQEPLRSLEDENKEAFRSLEKENQEPLKTLEEEDQSIVRPLETENHKSLRSLEEQDQETLRTLEKETQQRRRSLGEQDQMTLRPPEKVDLEPLKSLDQEIARPLENENQEFLKSLKEESVEAVKSLETEILESLKSAGQENLETLKSPETQAPLWTPEEINKSGGNESSRKGNSRTTGVCGSEPRDIQTPGRGESGIIEISGSMEPGEFEISRGVDKESQRNLEEEENLGKGEYQESLRSLEEEGQELPQSADVQRWEDTVEKDQELAQESPPGMAGVENKDEAELNLREQDGFTGKEEVVEQGELNATEEVWFPGEGHPENPEPKEQRGLVEGASVKGGAEGLQDPEGQSQQVGTPGLQAPQGLPEAIEPLVEDDVAPGGDQASPEVMLGSEPAMGESAAGAEPGLGQGVGGLGDPGHLTREEVMEPPLEEESLEAKRVQGLEGPRKDLEEAGGLGTEFSELPGKSRDPWEPPREGREESEAEAPRGAEEAFPAETLGHTGSDAPSPWPLGSEEAEEDVPPVLVSPSPTYTPILEDAPGLQPQAEGSQEASWGVQGRAEAGKVESEQEELGSGEIPEGLQEEGEESREESEEDELGETLPDSTPLGFYLRSPTSPRWTPLESRGHPLKETGKEGWDPAVLASEGLEEPSEKEEGEEGEEECGRDSDLSEEFEDLGTEAPFLPGVPGEVAEPLGQVPQLLLDPAAWDRDGESDGFADEEESGEEGEEDQEEGREPGAGRWGPGSSVGSLQALSSSQRGEFLESDSVSVSVPWDDSLRGAVAGAPKTALETESQDSAEPSGSEEESDPVSLEREDKVPGPLEIPSGMEDAGPGADIIGVNGQGPNLEGKSQHVNGGVMNGLEQSEESGARNALVSEGDRGSPFQEEEGSALKRSSAGAPVHLGQGQFLKFTQREGDRESWSSGED

SEQ ID NO: 14401 - DNA, 511 bp, Rattus norvegicus
  misc_feature (1)..(511): n=a, c, g or t
  ref <308>: DATABASE ACCESSION NUMBER: EMBL / M35601
  ref <309>: DATABASE ENTRY DATE: 2000-03-04
cctgaacttggttccttttatgacagccgctttggttcactcacaaagaacttcaaagaatttggcagtaagacctctgattctgacatcttcacagacatcgagaaccctagctcccatgtacctgagttttcttncagtagtaaaacctcaactgtcaggaaacaagtaaccaagagctataaaatggcagatgaggcagcaagtgaagctcaccaagaaggagacactcgaaccaccaagaggggccgagctcgcacaatgagaggtatccacgcttaactctgggaagttgccctgaccccctagactaagttaaccatttctgcaaagtgcttaccaggcgcgctctttcttaacctcttctagtgctttggtggaatctcattttttttcatgctagactgtacgttccttgggggcagggactttgccatgtgtctatttctctaattccccaatgcataacagtgcagtcatttctcaataaatatattttaaataaatgaac

SEQ ID NO: 14402 - protein, 782 aa, Rattus norvegicus
  ref <308>: DATABASE ACCESSION NUMBER: SWISS-Prot / P06399
  ref <309>: DATABASE ENTRY DATE: 2001-10-16
MLSLRVACLILSLASTVWTADTGTTSEFIEAGGDIRGPRIVERQPSQCKETDWPFCSDEDWNHKCPSGCRMKGLIDEANQDFTNRINKLKNSLFDFQKNNKDSNSLTRNIMEYLRGDFANANNFDNTFGQVSEDLRRRIQILKRKVIEKAQQIQVLQKDVRDQLIDMKRLEVDIDIKIRSCKGSCSRSVSREINLKDYEGQQKQLEQVIAKDLLPAKDRQYLPAIKMSPVPDLVPGSFKSQLQEGPPEWKALTEMRQMRMELERPGKDGASRGDLPGDSRGDSATRGPGSKIENPMTPGHGGSGYWRPGSSGSGSDGNWGSGTTGSDDTGTWGAGSSRPSSGSGNLKPSNPDWGEFSEFGGSSSPATRKEYHTGKLVTSKGDKELLIGNEKVTSTGTSTTRRSCSKTITKTVLGNDGHREVVKEVVTSDDGSDCGDGMDLGLTHSFSGRLDELSRMHPELGSFYDSRFGSLTSNFKEFGSKTSDSDIFTDIENPSSHVPEFSSSSKTSTVRKQVTKSYKMADEAASEAHQEGDTRTTKRGRARTMRDCDDVLQTHPSGAQNGIFSIKLPGSSKIFSVYCDQETSLGGWLLIQQRMDGSLNFNRTWQDYKRGFGSLNDKGEGEFWLGNDYLHLLTLRGSVLRVELEDWAGKEAYAEYHFRVGSEAEGYALQVSSYQGTAGDALMEGSVEEGTEYTSHSNMQFSTFDRDADQWEENCAEVYGGGWWYNSCQAANLNGIYYPGGTYDPRNNSPYEIENGVLWVPFRGADYSLWAVRMKIRPLVGQ

SEQ ID NO: 14403 - DNA, 2182 bp, Homo sapiens
  ref <308>: DATABASE ACCESSION NUMBER: Refseq / NM_021871
  ref <309>: DATABASE ENTRY DATE: 2001-02-03
gtctaggagccagccccacccttagaaaagatgttttccatgaggatcgtctgcctagttctaagtgtggtgggcacagcatggactgcagatagtggtgaaggtgactttctagctgaaggaggaggcgtgcgtggcccaagggttgtggaaagacatcaatctgcctgcaaagattcagactggcccttctgctctgatgaagactggaactacaaatgcccttctggctgcaggatgaaagggttgattgatgaagtcaatcaagattttacaaacagaataaataagctcaaaaattcactatttgaatatcagaagaacaataaggattctcattcgttgaccactaatataatggaaattttgagaggcgatttttcctcagccaataaccgtgataatacctacaaccgagtgtcagaggatctgagaagcagaattgaagtcctgaagcgcaaagtcatagaaaaagtacagcatatccagcttctgcagaaaaatgttagagctcagttggttgatatgaaacgactggaggtggacattgatattaagatccgatcttgtcgagggtcatgcagtagggctttagctcgtgaagtagatctgaaggactatgaagatcagcagaagcaacttgaacaggtcattgccaaagacttacttccctctagagataggcaacacttaccactgataaaaatgaaaccagttccagacttggttcccggaaattttaagagccagcttcagaaggtacccccagagtggaaggcattaacagacatgccgcagatgagaatggagttagagagacctggtggaaatgagattactcgaggaggctccacctcttatggaaccggatcagagacggaaagccccaggaaccctagcagtgctggaagctggaactctgggagctctggacctggaagtactggaaaccgaaaccctgggagctctgggactggagggactgcaacctggaaacctgggagctctggacctggaagtactggaagctggaactctgggagctctggaactggaagtactggaaaccaaaaccctgggagccctagacctggtagtaccggaacctggaatcctggcagctctgaacgcggaagtgctgggcactggacctctgagagctctgtatctggtagtactggacaatggcactctgaatctggaagttttaggccagatagcccaggctctgggaacgcgaggcctaacaacccagactggggcacatttgaagaggtgtcaggaaatgtaagtccagggacaaggagagagtaccacacagaaaaactggtcacttctaaaggagataaagagctcaggactggtaaagagaaggtcacctctggtagcacaaccaccacgcgtcgttcatgctctaaaaccgttactaagactgttattggtcctgatggtcacaaagaagttaccaaagaagtggtgacctccgaagatggttctgactgtcccgaggcaatggatttaggcacattgtctggcataggtactctggatgggttccgccataggcaccctgatgaagctgccttcttcgacactgcctcaactggaaaaacattcccaggtttcttctcacctatgttaggagagtttgtcagtgagactgagtctaggggctcagaatctggcatcttcacaaatacaaaggaatccagttctcatcaccctgggatagctgaattcccttcccgtggtaaatcttcaagttacagcaaacaatttactagtagcacgagttacaacagaggagactccacatttgaaagcaagagctataaaatggcagatgaggccggaagtgaagccgatcatgaaggaacacatagcaccaagagaggccatgctaaatctcgccctgtcagaggtatccacacttctcctttggggaagccttccctgtccccctagactaagttaaatatttctgcacagtgttcccatggccccttgcatttccttcttaactctctgttacacgtcattgaaactacacttttttggtctgtttttgtgctagactgtaagttccttgggggcagggcctttgtctgtctcatctctgtattcccaaatgcctaacagtacagagccatgactcaataaatacatgttaaatggatgaatg

SEQ ID NO: 14404 - protein, 866 aa, Homo sapiens
  ref <308>: DATABASE ACCESSION NUMBER: SWISS-Prot / 1FZA
  ref <309>: DATABASE ENTRY DATE: 2002-10-01
MFSMRIVCLVLSVVGTAWTADSGEGDFLAEGGGVRGPRVVERHQSACKDSDWPFCSDEDWNYKCPSGCRMKGLIDEVNQDFTNRINKLKNSLFEYQKNNKDSHSLTTNIMEILRGDFSSANNRDNTYNRVSEDLRSRIEVLKRKVIEKVQHIQLLQKNVRAQLVDMKRLEVDIDIKIRSCRGSCSRALAREVDLKDYEDQQKQLEQVIAKDLLPSRDRQHLPLIKMKPVPDLVPGNFKSQLQKVPPEWKALTDMPQMRMELERPGGNEITRGGSTSYGTGSETESPRNPSSAGSWNSGSSGPGSTGNRNPGSSGTGGTATWKPGSSGPGSTGSWNSGSSGTGSTGNQNPGSPRPGSTGTWNPGSSERGSAGHWTSESSVSGSTGQWHSESGSFRPDSPGSGNARPNNPDWGTFEEVSGNVSPGTRREYHTEKLVTSKGDKELRTGKEKVTSGSTTTTRRSCSKTVTKTVIGPDGHKEVTKEVVTSEDGSDCPEAMDLGTLSGIGTLDGFRHRHPDEAAFFDTASTGKTFPGFFSPMLGEFVSETESRGSESGIFTNTKESSSHHPGIAEFPSRGKSSSYSKQFTSSTSYNRGDSTFESKSYKMADEAGSEADHEGTHSTKRGHAKSRPVRDCDDVLQTHPSGTQSGIFNIKLPGSSKIFSVYCDQETSLGGWLLIQQRMDGSLNFNRTWQDYKRGFGSLNDEGEGEFWLGNDYLHLLTQRGSVLRVELEDWAGNEAYAEYHFRVGSEAEGYALQVSSYEGTAGDALIEGSVEEGAEYTSHNNMQFSTFDRDADQWEENCAEVYGGGWWYNNCQAANLNGIYYPGGSYDPRNNSPYEIENGVVWVSFRGADYSLRAVRMKIRPLVTQ

SEQ ID NO: 14405 - DNA, 6978 bp, Rattus norvegicus
  ref <308>: DATABASE ACCESSION NUMBER: EMBL / M57682
  ref <309>: DATABASE ENTRY DATE: 2000-03-04
ccggatgtgagctccggctgcccgcggtcccgagccagcggcggcgcgggcggcgacggcggcggcggggcaccgggcaccggggcgggcgggcggacgggcggcatggggggcgcgtcgagcggccccggcggccgggcgggcaccaccgcggtgtccctccgctagaggaggggaccaagccaattctcctttgcagcaaaaaaagagaaaaaagaaaaaaaagaaaaatttacatgtatatattactaagataatatatacatctgattttattttttacaaaaagtttattttgctccatttttcaaaaaaagaaggagcgtgggtggcaggcggtttttataaattattcttatttttgattatttgtctctgtccttccccaccccctgctgaagcgaaaataagggcagggaccgcgggctcctacctatcagtaacctcccatacccgttcctccccctccctaacgctgagcatagtgccctgcacacagtaggcgctcaataaatgttcgtggatgatgatgatgatgatgatgaaaaaaatgcagcatcaacggcagcagcaagaggaccacgcgaacgaggcaaactatgcaagaggcaccagactccctatttctggtgaaggaccaacttctcagccgaacagctccaagcaaaccgtcctgtcttggcaagctgcaattgatgctgctagacaggccaaggctgcccagaccatgagcacgtctgcacccccacctgtaggatctctctcccaaagaaaacgtcagcaatacgccaagagcaaaaaacagggtaactcgtctaacagccgacctgcccgtgccctcttctgtttatccctcaataaccccatccgaagagcctgcattagtatagtgaattggaaaccatttgacatatttatattattggctatttttgccaattgtgtggccttagctatttacatcccgttccctgaagatgattctaattcaacaaatcataacttggaaaaagtagaatatgccttcctgattatttttacagtggagacatttctgaagattatagcgtacggactgctgctgcatcctaatgcttacgttaggaacggatggaacttactggattttgttatagtaatagtaggattgtttagtgtaattttggaacaattaaccaaagaaacagaaggcgggaaccactctagtggcaaatcaggaggctttgatgtcaaagccctccgtgccttccgagtgttaagaccgcttcgacttgtatcaggagtgcccagtttacaagttgttctgaactccattataaaagccatggtccccctcctccacatagcccttttggtgttattcgtaattatcatctatgcgattatagggttggaactttttattggaaaaatgcacaaaacctgtttttttgctgactcagatatagtagctgaagaggacccagctccatgcgcgttctcagggaatggacgccagtgtgccgccaatggcacggaatgtaggagcggctgggtcggccccaatggaggcatcactaattttgacaactttgcctttgccatgctcactgtgttccagtgcatcaccatggagggctggacagatgtgctctactgggttaatgatgcgataggatgggagtggccatgggtgtattttgttagtctgatcatccttggctcatttttcgtccttaacctggttcttggtgtccttagtggagaattctcaaaggaaagagagaaggctaaagcacgtggagatttccagaagcttcgggagaagcagcagctggaagaggatctcaagggctacttggactggatcacccaggcagaagacatagatcctgagaatgaagaggagggtggagaggagggcaaacgaaacactagcatgcccaccagtgagaccgaatctgtgaacacagagaacgtaagtggtgaaggcgagacccagggatgctgtggaagtctctgccaagccatctcgaaatccaagctcagccgtcggtggcgtcgctggaaccggttcaatcgcaggagatgcagggcagctgtgaagtctgtcacgttttactggctggtgatcgttctggtgtttctcaacactctgacgatttcctctgagcactacaatcagccagactggctgacgcagattcaagatatagcgaacaaagtgctcttggctttgttcacctgtgagatgctggtgaagatgtacagcctgggcctccaggcctacttcgtctctctcttcaaccgcttcgattgctttgtggtgtgtgggggaatcaccgaaaccatcctggtggaactggagctcatgtctcccctgggcgtctctgtgttccggtgtgtacgtctcctgaggatcttcaaagtgaccaggcactggacttccctgagcaacttggtggcgtccctgttaaactccatgaagtccatcgcctctctgctgttgctgctcttcctcttcatcatcatcttctccctgctggggatgcagctgttcggagggaagttcaatttcgatgagacacagaccaagcgaagcaccttcgacaacttcccacaggcgctcctgactgtgttccagatcctgacgggcgaagactggaatgcggtgatgtatgacggcatcatggcctacggaggcccgtcctcctctggaatgattgtctgtatttacttcatcatccttttcatctgtggtaactatatcctgctgaagctcttcttggccattgctgtagacaatttggctgatgctgaaagtctgaacactgctcagaaagaggaagccgaagaaaaagaaaggaaaaaaattgccagaaaagaaagcctagaaaacaaaaaaaacaacaaaccagaggtcaaccagatagccaacagtgacaacaaggttactattgatgactatcaagaggaggctgaagataaggacccttatccaccctgcgatgtgccagtaggtgaagaggaagaggaggaggaagaggacgagcctgaggttcctgctggtccccgtcctcgaagaatctcagagttgaacatgaaggagaaaattgcgcccatccccgaaggaagcgcattcttcattcttagcaagaccaacccgatccgtgtgggttgccacaaactcatcaaccaccacatcttcaccaacctcatcctggtcttcatcatgctgagcagcgctgccctggccgcagaggatcccatccgcagccactccttccgcaacactatactgggctactttgactatgctttcacagccatctttacggttgaaatcctgttaaagatgacaacttttggagcgttcttgcacaaaggggctttctgtaggaactacttcaatttgctggacatgctggtcgttggggtgtctctggtgtcatttgggattcaatccagtgccatctcggttgtgaagattctgagggtcttaagggtcttgaggcctctcagagcaatcaacagagcaaaaggacttaagcacgtggtccagtgtgtctttgtggccatccgaaccatcggcaacatcatgatcgtcacgaccctgctccagttcatgtttgcttgcattggggtccagctgttcaaggggaagttctaccgttgcacagatgaggccaaaagtaaccccgaggagtgcagggggcttttcatcctttataaggacggcgatgtcgacagtcccgtggtccgtgagaggatctggcaaaacagtgatttcaatttcgacaatgtcctttcggctatgatggcgctcttcacggtctcgacttttgagggctggcccgcgttgctgtacaaagctatcgactcaaacggagagaacgttggtcctgtctacaactaccgtgtggagatctccatcttcttcattatctacatcatcatcgtggccttcttcatgatgaatatcttcgtgggcttcgtcatcgtcaccttccaggagcagggagaaaaggagtataagaactgtgagctggacaaaaatcagcgtcagtgtgtggaatatgccttgaaggcccgccccttaaggagatacatccccaaaaacccataccagtacaagttctggtacgtggtgaactcctcgcctttcgaatatatgatgtttgtcctcatcatgctcaacacgctctgcctggccatgcagcactatgagcaatccaagatgttcaatgacgccatggacattctgaacatggtcttcacgggggtcttcaccgttgagatggttttgaaagtcatcgcatttaagcccaaggggtattttagtgacgcctggaacacgtttgactccctcatcgtaatcggcagcattatagacgtggcactcagcgaagctgacccatctgacagtgagaatatccctctcccaactgccacacctgggaactctgaagagagcaatagaatctccatcacctttttccgtcttttccgagtgatgcggttggtgaagcttctcagcagaggggaaggcatccggactctgctatggaccttcattaagtccttccaggcactcccatatgtcgccctcctcattgccatgctcttcttcatctacgccgtcattggcatgcagatgtttgggaaggttgccatgagagataacaaccagatcaataggaacaacaacttccagacgtttccccaggcagtgctgctgctcttcaggtgtgcaacaggggaggcctggcaggagatcatgctcgcctgcctccctgggaagctgtgtgacccggactcagattacaacccaggagaggaatatacttgtgggagcaactttgccattgtctacttcatcagcttttacatgctctgtgcgttcctgatcatcaacctcttcgtggctgtcatcatggacaattttgactatctgacgagggactggtctattctggggcctcaccacttggacgaattcaaaagaatatggtctgaatatgaccccgaggcaaagggaaggataaaacaccttgatgtggtcactttgctccgacgtatccagcctcccctgggatttggaaagttgtgtccacaccgagtggcgtgtaagagattggtcgccatgaacatgcctctcaacagtgatgggacagtcatgttcaatgcaactctgtttgctttggtacggacggctctcaagatcaagactgaaggcaacctggagcaagctaatgaagagctccgcgctgtgataaagaaaatctggaagaagacaagcatgaagctacttgaccaagttgtccctccagctggtgatgatgaggtaaccgtggggaagttctatgccactttcctgatacaggactactttaggaaattcaagaagcggaaagagcaaggcctggtggggaaataccctgcgaagaacaccacgatcgccctacagatgcttgaacggatgctctagagttgtctgcctgagctaccgcaccaagctggttagtccggaggcgctgtggctaaggccttgaaagggcaaactccccctcgagcttatttctactgaagcagcatttcaggagaaatgcaggcaccaaagccctggggagaccccttgcgagcaaggcactcctccggaaggaaggaaggaaggcagaagccgccgctgtgtgtggctcatctgtggagccctggctgcctgttgcggacactgctcatggtggctccttttcatgaaagggaacatatgagttatgttttccccttccaagccagagactcagtgagagggaaagaaagagagagagggagggagagagggagagagagaacgcaaaggggcagccaccccacagagaaatcaaatgaacacaacttgctgacgatggccagtgaataaaataaataatgtttttaatatatatatatatacatatatatgtgtatgtatatatatatgactaagcagacctgtgtaaggcagacaacggactctgccccaaagtcctgcatccctagtttgcccggactcccaaagactggcaggctgattggaactgagcagacagagttcctttcctgtgccagcacgtcacaacctcctgaccacccggccctgcttgctgcagtgacctagtccagaatgcactgtaggtggaaggccaggaagctcagacacacccattgaaactaacacatacacccgcatgccaaaaccaaccaggcaacagctcaggttccgtctcccctaccgtgtccgcggggaaacgccaccacacccaaacctcatctaccattgttcgtctctagcccgcactcagagccagtctgggacgctctttggaagcagtgtggtatagtttcaaggacactgggagtcagggaacctgggttctagtcccagctcagccattcacttgctgcgtgaccttgggcaagacacttaacctctctgtgcctcagtttccccaactgtaaaagggggtaataatgtcgacctacctcacagggctgttgtgaggaatcgctacgtgactgtaaaggctccttggacgtataattgcttattattaagacttcaacattaataatatcatatgcctgtttactaccagaacttcaagaaagtcttggtttgatctcttttctgttctgtaatgtagttatccatcgagaattctccccccttttaagatcctaggcaatgcataaagatgtaagcaggtaatagccagaccacgtttccaagtagtaacaataggagatttttgaccaaaacgttggtcgatgagggctttgctgtcagattcttaacacctcctcagagggggtcgagtcttaacctctgaagttagtctacgatgcccaaaatggccaaggtaggagagtcagtattcaaagtttgggggacgaatctaaaaaaagaagaggcaaaggaaaaggagaggaagaaggtgggggggcttcaattcttgatct

SEQ ID NO: 14406 - protein, 2203 aa, Rattus norvegicus; identical to SEQ ID NO: 8123
  ref <308>: DATABASE ACCESSION NUMBER: SWISS-Prot / P27732
  ref <309>: DATABASE ENTRY DATE: 2002-06-15

SEQ ID NO: 14407 - DNA, 7193 bp, Homo sapiens
  ref <308>: DATABASE ACCESSION NUMBER: EMBL / M83566
  ref <309>: DATABASE ENTRY DATE: 1999-07-02
agaataagggcagggaccgcggctcctatctcttggtgatccccttccccattccgcccccgcctcaacgcccagcacagtgccctgcacacagtagtcgctcaataaatgttcgtggatgatgatgatgatgatgatgaaaaaaatgcagcatcaacggcagcagcaagcggaccacgcgaacgaggcaaactatgcaagaggcaccagacttcctctttctggtgaaggaccaacttctcagccgaatagctccaagcaaactgtcctgtcttggcaagctgcaatcgatgctgctagacaggccaaggctgcccaaactatgagcacctctgcacccccacctgtaggatctctctcccaaagaaaacgtcagcaatacgccaagagcaaaaaacagggtaactcgtccaacagccgacctgcccgcgcccttttctgtttatcactcaataaccccatccgaagagcctgcattagtatagtggaatggaaaccatttgacatatttatattattggctatttttgccaattgtgtggccttagctatttacatcccattccctgaagatgattctaattcaacaaatcataacttggaaaaagtagaatatgccttcctgattatttttacagtcgagacatttttgaagattatagcgtatggattattgctacatcctaatgcttatgttaggaatggatggaatttactggattttgttatagtaatagtaggattgtttagtgtaattttggaacaattaaccaaagaaacagaaggcgggaaccactcaagcggcaaatctggaggctttgatgtcaaagccctccgtgcctttcgagtgttgcgaccacttcgactagtgtcaggggtgcccagtttacaagttgtcctgaactccattataaaagccatggttcccctccttcacatagcccttttggtattatttgtaatcataatctatgctattataggattggaactttttattggaaaaatgcacaaaacatgtttttttgctgactcagatatcgtagctgaagaggacccagctccatgtgcgttctcagggaatggacgccagtgtactgccaatggcacggaatgtaggagtggctgggttggcccgaacggaggcatcaccaactttgataactttgcctttgccatgcttactgtgtttcagtgcatcaccatggagggctggacagacgtgctctactgggtaaatgatgcgataggatgggaatggccatgggtgtattttgttagtctgatcatccttggctcatttttcgtccttaacctggttcttggtgtccttagtggagaattctcaaaggaaagagagaaggcaaaagcacggggagatttccagaagctccgggagaagcagcagctggaggaggatctaaagggctacttggattggatcacccaagctgaggacatcgatccggagaatgaggaagaaggaggagaggaaggcaaacgaaatactagcatgcccaccagcgagactgagtctgtgaacacagagaacgtcagcggtgaaggcgagaaccgaggctgctgtggaagtctctggtgctggtggagacggagaggcgcggccaaggcggggccctctgggtgtcggcggtggggtcaagccatctcaaaatccaaactcagccgacgctggcgtcgctggaaccgattcaatcgcagaagatgtagggccgccgtgaagtctgtcacgttttactggctggttatcgtcctggtgtttctgaacaccttaaccatttcctctgagcactacaatcagccagattggttgacacagattcaagatattgccaacaaagtcctcttggctctgttcacctgcgagatgctggtaaaaatgtacagcttgggcctccaagcatatttcgtctctcttttcaaccggtttgattgcttcgtggtgtgtggtggaatcactgagacgatcctggtggaactggaaatcatgtctcccctggggatctctgtgtttcggtgtgtgcgcctcttaagaatcttcaaagtgaccaggcactggacttccctgagcaacttagtggcatccttattaaactccatgaagtccatcgcttcgctgttgcttctgctttttctcttcattatcatcttttccttgcttgggatgcagctgtttggcggcaagtttaattttgatgaaacgcaaaccaagcggagcacctttgacaatttccctcaagcacttctcacagtgttccagatcctgacaggcgaagactggaatgctgtgatgtacgatggcatcatggcttacgggggcccatcctcttcaggaatgatcgtctgcatctacttcatcatcctcttcatttgtggtaactatattctactgaatgtcttcttggccatcgctgtagacaatttggctgatgctgaaagtctgaacactgctcagaaagaagaagcggaagaaaaggagaggaaaaagattgccagaaaagagagcctagaaaataaaaagaacaacaaaccagaagtcaaccagatagccaacagtgacaacaaggttacaattgatgactatagagaagaggatgaagacaaggacccctatccgccttgcgatgtgccagtaggggaagaggaagaggaagaggaggaggatgaacctgaggttcctgccggaccccgtcctcgaaggatctcggagttgaacatgaaggaaaaaattgcccccatccctgaagggagcgctttcttcattcttagcaagaccaacccgatccgcgtaggctgccacaagctcatcaaccaccacatcttcaccaacctcatccttgtcttcatcatgctgagcagcgctgccctggccgcagaggaccccatccgcagccactccttccggaacacgatactgggttactttgactatgccttcacagccatctttactgttgagatcctgttgaagatgacaacttttggagctttcctccacaaaggggccttctgcaggaactacttcaatttgctggatatgctggtggttggggtgtctctggtgtcatttgggattcaatccagtgccatctccgttgtgaagattctgagggtcttaagggtcctgcgtcccctcagggccatcaacagagcaaaaggacttaagcacgtggtccagtgcgtcttcgtggccatccggaccatcggcaacatcatgatcgtcactaccctcctgcagttcatgtttgcctgtatcggggtccagttgttcaaggggaagttctatcgctgtacggatgaagccaaaagtaaccctgaagaatgcaggggacttttcatcctctacaaggatggggatgttgacagtcctgtggtccgtgaacggatctggcaaaacagtgatttcaacttcgacaacgtcctctctgctatgatggcgctcttcacagtctccacgtttgagggctggcctgcgttgctgtataaagccatcgactcgaatggagagaacatcggcccaatctacaaccaccgcgtggagatctccatcttcttcatcatctacatcatcattgtagctttcttcatgatgaacatctttgtgggctttgtcatcgttacatttcaggaacaaggagaaaaagagtataagaactgtgagctggacaaaaatcagcgtcagtgtgttgaatacgccttgaaagcacgtcccttgcggagatacatccccaaaaacccctaccagtacaagttctggtacgtggtgaactcttcgcctttcgaatacatgatgtttgtcctcatcatgctcaacacactctgcttggccatgcagcactacgagcagtccaagatgttcaatgatgccatggacattctgaacatggtcttcaccggggtgttcaccgtcgagatggttttgaaagtcatcgcatttaagcctaaggggtattttagtgacgcctggaacacgtttgactccctcatcgtaatcggcagcattatagacgtggccctcagcgaagcggacccaactgaaagtgaaaatgtccctgtcccaactgctacacctgggaactctgaagagagcaatagaatctccatcacctttttccgtcttttccgagtgatgcgattggtgaagcttctcagcaggggggaaggcatccggacattgctgtggacttttattaagtcctttcaggcgctcccgtatgtggccctcctcatagccatgctgttcttcatctatgcggtcattggcatgcagatgtttgggaaagttgccatgagagataacaaccagatcaataggaacaataacttccagacgtttccccaggcggtgctgctgctcttcaggtgtgcaacaggtgaggcctggcaggagatcatgctggcctgtctcccagggaagctctgtgaccctgagtcagattacaaccccggggaggagtatacatgtgggagcaactttgccattgtctatttcatcagtttttacatgctctgtgcatttctgatcatcaatctgtttgtggctgtcatcatggataatttcgactatctgacccgggactggtctattttggggcctcaccatttagatgaattcaaaagaatatggtcagaatatgaccctgaggcaaagggaaggataaaacaccttgatgtggtcactctgcttcgacgcatccagcctcccctggggtttgggaagttatgtccacacagggtagcgtgcaagagattagttgccatgaacatgcctctcaacagtgacgggacagtcatgtttaatgcaaccctgtttgctttggttcgaacggctcttaagatcaagaccgaagggaacctggagcaagctaatgaagaacttcgggctgtgataaagaaaatttggaagaaaaccagcatgaaattacttgaccaagttgtccctccagctggtgatgatgaggtaaccgtggggaagttctatgccactttcctgatacaggactactttaggaaattcaagaaacggaaagaacaaggactggtgggaaagtaccctgcgaagaacaccacaattgccctacaggcgggattaaggacactgcatgacattgggccagaaatccggcgtgctatatcgtgtgatttgcaagatgacgagcctgaggaaacaaaacgagaagaagaagatgatgtgttcaaaagaaatggtgccctgcttggaaaccatgtcaatcatgttaatagtgataggagagattcccttcagcagaccaataccacccaccgtcccctgcatgtccaaaggccttcaattccacctgcaagtgatactgagaaaccgctgtttcctccagcaggaaattcggtgtgtcataaccatcataaccataattccataggaaagcaagttcccacctcaacaaatgccaatctcaataatgccaatatgtccaaagctgcccatggaaagcggcccagcattgggaaccttgagcatgtgtctgaaaatgggcatcattcttcccacaagcatgaccgggagcctcagagaaggtccagtgtgaaaagaacccgctattatgaaacttacattaggtccgactcaggagatgaacagctcccaactatttgccgggaagacccagagatacatggctatttcagggacccccactgcttgggggagcaggagtatttcagtagtgaggaatgctacgaggatgacagctcgcccacctggagcaggcaaaactatggctactacagcagatacccaggcagaaacatcgactctgagaggccccgaggctaccatcatccccaaggattcttggaggacgatgactcgcccgtttgctatgattcacggagatctccaaggagacgcctactacctcccaccccagcatcccaccggagatcctccttcaactttgagtgcctgcgccggcagagcagccaggaagaggtcccgtcgtctcccatcttcccccatcgcacggccctgcctctgcatctaatgcagcaacagatcatggcagttgccggcctagattcaagtaaagcccagaagtactcaccgagtcactcgacccggtcgtgggccacccctccagcaacccctccctaccgggactggacaccgtgctacacccccctgatccaagtggagcagtcagaggccctggaccaggtgaacggcagcctgccgtccctgcaccgcagctcctggtacacagacgagcccgacatctcctaccggactttcacaccagccagcctgactgtccccagcagcttccggaacaaaaacagcgacaagcagaggagtgcggacagcttggtggaggcagtcctgatatccgaaggcttgggacgctatgcaagggacccaaaatttgtgtcagcaacaaaacacgaaatcgctgatgcctgtgacctcaccatcgacgagatggagagtgcagccagcaccctgcttaatgggaacgtgcgtccccgagccaacggggatgtgggccccctctcacaccggcaggactatgagctacaggactttggtcctggctacagcgacgaagagccagaccctgggagggatgaggaggacctggcggatgaaatgatatgcatcaccaccttgtagcccccagcgaggggcagactggctctggcctcaggtggggcgcaggagagccaggggaaaagtgcctcatagttaggaaagtttaggcactagttgggagtaatattcaattaattagacttttgtataagagatgtcatgcctcaagaaagccataaacctggtaggaacaggtcccaagcggttgagcctggcagagtaccatgcgctcggccccagctgcaggaaacagcaggccccgccctctcacagaggatgggtgaggaggccagacctgccctgccccattgtccagatgggcactgctgtggagtctgcttctcccatgtaccagggcaccaggcccacccaactgaaggcatggcggcggggtgcaggggaaagttaaaggtgatgacgatcatcacacctcgtgtcgttacctcagccatcggtctagcatatcagtcactgggcccaacatatccatttttaaaccctttcccccaaatacactgcgtcctggttcctgtttagctgttctgaaata

SEQ ID NO: 14408 - protein, 2182 aa, Homo sapiens
  misc_feature (1)..(2182): Xaa=Unknown amino acid
MMMMMMMKKMQHQRQQQADHANEANYARGTRLPLSGEGPTSQPNSSKQTVLSWQAAIDAARQAKAAQTMSTSAPPPVGSLSQRKRQQYAKSKKQGNSSNSRPARALFCLSLNNPIRRACISIVEWKPFDIFILLAIFANCVALAIYIPFPEDDSNSTNHNLEKVEYAFLIIFTVETFLKIIAYGLLLHPNAYVRNGWNLLDFVIVIVGLFSVILEQLTKETEGGNHSSGKSGGFDVKALRAFRVLRPLRLVSGVPSLQVVLNSIIKAMVPLLHIALLVLFVIIIYAIIGLELFIGKMHKTCFFADSDIVAEEDPAPCAFSGNGRQCTANGTECRSGWVGPNGGITNFDNFAFAMLTVFQCITMEGWTDVLYWVNDAIGWEWPWVYFVSLIILGSFFVLNLVLGVLSGEFSKEREKAKARGDFQKLREKQQLEEDLKGYLDWITQAEDIDPENEEEGGEEGKRNTSMPTSETESVNTENVSGEGENRGCCGSLWCWWRRRGAAKAGPSGCRRWGQAISKSKLSRRWRRWNRFNRRRCRAAVKSVTFYWLVIVLVFLNTLTISSEHYNQPDWLTQIQDIANKVLLALFTCEMLVKMYSLGLQAYFVSLFNRFDCFVVCGGITETILVELEIMSPLGISVFRCVRLLRIFKVTRHWTSLSNLVASLLNSMKSIASLLLLLFLFIIIFSLLGMQLFGGKFNFDETQTKRSTFDNFPQALLTVFQILTGEDWNAVMYDGIMAYGGPSSSGMIVCIYFIILFICGNYILLNVFLAIAVDNLADAESLNTAQKEEAEEKERKKIARKESLENKKNNKPEVNQIANSDNKVTIDDYREEDEDKDPYPPCDVPVGEEEEEEEEDEPEVPAGPRPRRISELNMKEKIAPIPEGSAFFILSKTNPIRVGCHKLINHHIFTNLILVFIMLSSAALAAEDPIRSHSFRNTILGYFDYAFTAIFTVEILLKMTTFGAFLHKGAFCRNYFNLLDMLVVGVSLVSFGIQSSAISVVKILRVLRVLRPLRAINRAKGLKHVVQCVFVAIRTIGNIMIVTTLLQFMFACIGVQLFKGKFYRCTDEAKSNPEECRGLFILYKDGDVDSPVVRERIWQNSDFNFDNVLSAMMALFTVSTFEGWPALLYKAIDSNGENIGPIYNHRVEISIFFIIYIIIVAFFMMNIFVGFVIVTFQEQGEKEYKNCELDKNQRQCVEYALKARPLRRYIPKNPYQYKFWYVVNSSPFEYMMFVLIMLNTLCLAMQHYEQSKMFNDAMDILNMVFTGVFTVEMVLKVIAFKPKGYFSDAWNTFDSLIVIGSIIDVALSEADPTESENVPVPTATPGNSEESNRISITFFRLFRVMRLVKLLSRGEGIRTLLWTFIKSFQALPYVALLIAMLFFIYAVIGMQMFGKVAMRDNNQINRNNNFQTFPQAVLLLFRCATGEAWQEIMLACLPGKLCDPESDYNPGEEYTCGSNFAIVYFISFYMLCAFLIINLFVAVIMDNFDYLTRDWSILGPHHLDEFKRIWSEYDPEAKGRIKHLDVVTLLRRIQPPLGFGKLCPHRVACKRLVAMNMPLNSDGTVMFNATLFALVRTALKIKTEGNLEQANEELRAVIKKIWKKTSMKLLDQVVPPAGDDEVTVGKFYATFLIQDYFRKFKKRKEQGLVGKYPAKNTTIALQAGLRTLHDIGPEIRRAISCDLQDDEPEETKREEEDDVFKRNGALLGNHVNHVNSDRRDSLQQTNTTHRPLHVQRPSIPPASDTEKPLFPPAGNSVCHNHHNHNSIGKQVPTSTNANLNNANMSKAAHGKRPSIGNLEHVSENGHHSSHKHDREPQRRSSVKRTRYYETYIRSDSGDEQLPTICREDPEIHGYFRDPHCLGEQEYFSSEECYEDDSSPTWSRQNYGYYSRYPGRNIDSERPRGYHHPQGFLEDDDSPVCYDSRRSPRRRLLPPTPASHRRSSFNFECLRRQSSQEEVPSSPIFPHRTALPLHLMQQQIMAVAGLDSSKAQKYSPSHSTRSWATPPATPPYRDWTPCYTPLIQVEQSEALDQVNGSLPSLHRSSWYTDEPDISYRTFTPASLTVPSSFRNKNSDKQRSADSLVEAVLISEGLGRYARDPKFVSATKHEIADACDLTIDEMESAASTLLNGNVRPRANGDVGPLSHRQDYELQDFGPGYSDEEPDPGRDEEDLADEMICITTLX

SEQ ID NO: 14409 - DNA, 4857 bp, Rattus norvegicus
  ref <308>: DATABASE ACCESSION NUMBER: EMBL / M64791
  ref <309>: DATABASE ENTRY DATE: 2000-03-04
aagcttcgttcttaattattctattaaaacagaaaatcagtttgcttttagcataaccaagaaaggtcattcaactgcaaatgaacttgcccaagagtacaattgtaattatcccagaaacataaccatgattctggatatccagtaaccattgcttgctgtgtagcacacataagccatcgaggaaggagaatttctacatttttctctacacgcaggtggaaatgatcagactgacagtcacatatatagcatagattccagtgactcacaaacaacaaggttcacagtatatgttaagaggatttttccatattcccttcaatgaggcaggaccaaattatcctatgctgtgtcataaacaaaaaagacacaaaaataaactctacagagatgttaaattgagagatggttaaaacctaatacttacaaaaaaaaagaatgagaaagaaatgttgagacacgacaatgaaggaaggatgttttaagtaaaatatgtagacaaacaagaaaatcttttagagatagagcatctggttaccaattttgaaatgaaaattgagatataaataatgaaaaggaaaacaaatgcatgaccaatatgttaagcatattttgtatatgcttaatctgaacaataaagtaaaagagttctcttcaagtgcatgaagatgacccaagaataatacggaaaatgaacacagaggactgagtcccaataaaaagaaaaagaaacaaagagacagaaaaagaagtttgacaagaagtgctttcagaaaattgaatataaacagcattgaatgtaattctgaagacagggaatttaactgatattgaaaaccatgataactgtgtgcagctgaaccactgaggggatcaagaagactgctgccttgtacaggaccataatttagcaggaagccacttaaagaaaacaattaagaaagtggagctgtccatggatgttagaaatatataatgacccaatgaataatcaatgaattacagattcatgaaactgacttgtctaaattacatatgggttccaagccatttttacttggattttagtgtaatactaggacatatattttaccagccaatgttgctactattgggttaggtcaacagaatagtggagagacattttgagggttagctggctaggtgtaatacttcaaatttgtatatgaataaactcaacaccatcaatattaactaactgcagtacatatagggacacatatatgtgataaagattaagctatactactaattagagacactgaactggttaatcttgttataattcattgctaacaatttaaacacaggtgtgcacatactacttctacccccaacacacagtattatacagacagtctcatcaaatagaatgagatatgcctatactgatgatcctatgacttcaatatctggtctattctcttgaacatgatttctttcaaattcaatataatccttgttgtaccatcgagaaaggcagcactgacacctgttctttacctcatcctgctgggcaaatgtcccagtgtggagtcagggatgtaagatttcctgctctattaagtatgaaatagcatagaatggaattcaaagtgccattcttctggtgtgacttataaaggcagagccctgcttattccagcacagacttgggagaaacaccagagcctcctccaagatgctggtggtcctgttcacagcggtcttgctaaccctgagctatgctcaggaaccaggtgatggtatgagaatatggttgtgggcaccatgattctttttaaaatacaggagacagcagtactggacaggagggagatgggacagagaacaagttatgagagataaatgaaaacacagagtctttggctttgaaaaatggatagtctcagttttgaagacactatggtagttaaaataaactatgtgtaccagtaaccttgctgtgcagtacattaagggatgatgacagaatgaaaaacataccagagccattcttaggatggcaaatgaagtaatacaactgaaacttttggatagagaaatagaatcctcccaattttcatttttccacacccattttatatttaacggtgttaccattttttgttcaatcatttactcagatgtttattcttttcttgagaagacatcaaattaaacataagaattaattaaagcaaaagatataaaagttataaattatgtagagataaaaggatcagtattgagaaagagatgatagatagatagatagatagatagatagatagatagatagatagatagatagatagataatgacatatctgtgtaaccaatgagattcgaggggcattggagaggaccaaaagtgaagtttattttgtgagttagtggttgacacgcagaatagtagtcagcattggatgctaccaaatgctgctagctggtcatttcacagacattggctaaaacgtcccgtaaaattgacagatcatggctaaaatctcttactgcctgtaggatgctagttgtttttctgacctcacttttgagtctagactatgctttatttcccaatggccaactgtgaacactctttcccaataatatcaaggaagcaccaatgaatcttcaatcttgttacttgcctgttagcaaggatatttctattaattcttctattaattatatttctaatccacaatgtcatttctccttttaagaactaatgaatgtaaatttgtaaatttttaggcaaaaaaatctccaacttttacactacagagcaggatctgggagagcaaggaatttggaagaagccagagggcaggcctcactgaaaataggagcaatttaacgtttccatcacaaaggtgtggtggctaggaaataaaactcagatgcagtgttctgattttaactcctctatgataagaaaaggtcctcagtgtctacacacaacgtcttgttgcctgtgttttagtttatttcagccagaaaagcacaagaaaagcacagtgtctcttttctcactgactctatacacaaaataggaaaaatgtatggagcccaaagattataacctgtgctgacatttggtcttgtttttaccatgaaacatagtgatttgatttagattcacaaaagtcagtttggtctcacaacgcaactggcaactgaacaaacatggataagatgatttctttgttttacatttgtctaaggacaatgactcttatcattgtggaaatcatatttagcattgatgcatgcattccaaagaccatgtgttatgtataactaagttcattgatcattttctttattcgttttagaacttcagagcctagaccagacaccaaatcagaaaccacctccaccaggattcccaccaagaccacctgctaatgggagccagcaaggcccacccccacaaggaggcccacaacagaaaccacctcagcctggaaagccccaaggccccaccccaccaggaggcccacagcagaaaccccctcagcctggaaaccaacaaggcccacccccaccaggaggcccacaacagaaaccacctcagcctgaaaagccccaaggcccacccccaccaggaggcccacagcagagacctcctcagcctggaaaccaacaaggcccacccccaccaggaggcccacagcagaaaccccctcagcctgaaaagccccaaggcccacccccaccaggaggcccacagcagaaaccacctcagcctggaaagccccaaggcccacccccaccaggaggcccacagcagagacctcctcagccaggaaaccagcaaagcccaccacaaggtccccaattggacagaccacagggatctttccagagtttgggtcctcagtaaaccagaatcctctgaaaggtatgactcatatttttcatcttgctgtgttgcagacaactggactctattttttcagggtatagaaagtaaccagcctaatatgtagaaatgacattatccttaacccaaaaacatatatctgtattaaatatttaatgatctttccatgagagaatatatgactttggaagaatatgtcctccaaattttgtcttccacagttattgccatgtcgtatatgtttctggcaagaagaccccttttcttcctaaggtcctttacctcaaggctgggactcatgaattcggagctgggaccagtcacagagtcatgtaatataacaactttgagcatggtagaattatgtgggagaagggtaagccacactcacaaatatcaagctggcttgtgtcccttcaaacaaatctgtctaaacttttttaaatattccgaagatattctaaggtctatacattgatctgggttcagctcaagtatactacaatgctataatataccaaattatcagcctgttattttaaaatgtaaataaattttacaacccattatgttttagagaccaggcaagggaaagcaggagaatacttgtgccaggtaactggattatggacaattgctgaactaaattacaaaagcaaaccataagactggattgagcacatggattattttcagtcatgaaattccatccagaaaaaaaagacatcaatcagaagtgcaggttgatcattttattaatgttgtgaatctccagttctgaagctccgttacatcagaaaaacaggagggagagacttcttactcactttctgaaataaaacataatggagacaggttacagagagaacatgacatgtcaataataagcattaagaacatgcagatagaaaacaaacacaagaatgaagaacatgatgatatctgtgtatccttataagctt

SEQ ID NO: 14410 - protein, 202 aa, Rattus norvegicus
  ref <308>: DATABASE ACCESSION NUMBER: SWISS-Prot / AAA42066
  ref <309>: DATABASE ENTRY DATE: 2003-02-01
MLVVLFTAVLLTLSYAQEPELQSLDQTPNQKPPPPGFPPRPPANGSQQGPPPQGGPQQKPPQPGKPQGPTPPGGPQQKPPQPGNQQGPPPPGGPQQKPPQPEKPQGPPPPGGPQQRPPQPGNQQGPPPPGGPQQKPPQPEKPQGPPPPGGPQQKPPQPGKPQGPPPPGGPQQRPPQPGNQQSPPQGPQLDRPQGSFQSLGPQ

SEQ ID NO: 14411 - DNA, 5480 bp, Rattus norvegicus; identical to SEQ ID NO: 12933
  ref <308>: DATABASE ACCESSION NUMBER: EMBL / M64793
  ref <309>: DATABASE ENTRY DATE: 2000-03-04

SEQ ID NO: 14412 - protein, 274 aa, Rattus norvegicus; identical to SEQ ID NO: 12934
  ref <308>: DATABASE ACCESSION NUMBER: SWISS-Prot / AAA42064
  ref <309>: DATABASE ENTRY DATE: 2003-02-01

SEQ ID NO: 14413 - DNA, 1663 bp, Rattus norvegicus
  ref <308>: DATABASE ACCESSION NUMBER: EMBL / M77479
  ref <309>: DATABASE ENTRY DATE: 2000-03-04
cagccacattttgtccacaaactctgtcctgaaaggggactgactgaagaaaacatccagcaagctctgggcaaggaaggacagcagcagagagcgagggccgtgttcgctgtgccagaggatggaggtgcacaacgtatcagcccctttcaatttctccctgccgcctggctttggccaccgggccacagacaaggcgcttagcatcatcctggtgttaatgttgctgcttatcatgctctcactgggctgcaccatggaattcagcaagatcaaggctcacttgtggaagcccaaaggggtgatcgttgccttggtggcccagtttggcatcatgcccctcgctgcttttcttctcggcaagatctttcacctgagcaacattgaagctctggccatcctcatctgtggctgctctcccggggggaacttgtccaacctcttcaccctggccatgaagggggacatgaacctcagcatcgtgatgaccacctgctccagcttcagtgccttgggcatgatgccactcctcttatacgtctacagcaaaggcatctacgatggagaccttaaggacaaggtgccctacaaaggcattatgatatcactagtcatagttctcattccttgcaccatagggatcgtcctcaagtccaaaaggccacactatgtaccctacatcctcaagggaggcatgatcatcaccttcctcctctctgtggctgtcacagccctctctgtcatcaatgtgggcaacagcatcatgttcgtcatgacaccacacttactggctacctcctccctgatgcccttctctggctttctgatgggttacattctctctgctctcttccaactcaatccaagctgcagacgcaccatcagcatggaaacaggattccaaaacattcaactctgttctaccatcctcaatgtgaccttcccccctgaagtcattgggccacttttcttctttcctctcctctacatgattttccagcttgcagaaggacttctcatcatcattatcttccggtgctatgagaaaatcaagcctccaaaggaccaaacaaaaattacctacaaagctgctgcaactgaggatgctactccagcagctctggaaaaaggtacccacaatgggaatattcctcctctccaacctggtccttcccctaatggcctgaattctggtcagatggcaaattagaatgtgaaacttcgaagcagcaagaaaaggaacgaacgtcgacgttgccggaatgtttgtctagcacttcgggcaaaccatcagaaccatggagccatgaactgagacagaagggcatctatctatccagtaactgtaacccataccaatttgcttttgtttaaattttctatttaaaagataaacaagaattaggcaaaaatgttcctgcctataatcccgatgctcagaaactcaagatcaaccttaagtatacaaaacaagactgtctcaagaaaccaaaaacacttttcagtggctatgaactctatgaaagctgaaccaaacagcttcatctgataaacattaacttcactatttccaaactttccagtaagcaggtgttttgttcattaaacatccacaacctgcttcatgttactcaaaatgaaataaagtgcaactcctagttct

SEQ ID NO: 14414 - protein, 362 aa, Rattus norvegicus
  ref <308>: DATABASE ACCESSION NUMBER: SWISS-Prot / P26435
  ref <309>: DATABASE ENTRY DATE: 1994-02-01
MEVHNVSAPFNFSLPPGFGHRATDKALSIILVLMLLLIMLSLGCTMEFSKIKAHLWKPKGVIVALVAQFGIMPLAAFLLGKIFHLSNIEALAILICGCSPGGNLSNLFTLAMKGDMNLSIVMTTCSSFSALGMMPLLLYVYSKGIYDGDLKDKVPYKGIMISLVIVLIPCTIGIVLKSKRPHYVPYILKGGMIITFLLSVAVTALSVINVGNSIMFVMTPHLLATSSLMPFSGFLMGYILSALFQLNPSCRRTISMETGFQNIQLCSTILNVTFPPEVIGPLFFFPLLYMIFQLAEGLLIIIIFRCYEKIKPPKDQTKITYKAAATEDATPAALEKGTHNGNIPPLQPGPSPNGLNSGQMAN

SEQ ID NO: 14415 - DNA, 1580 bp, Homo sapiens
  ref <308>: DATABASE ACCESSION NUMBER: EMBL / L21893
  ref <309>: DATABASE ENTRY DATE: 1999-07-02
aaagaaggcatccagcaagaactgcacaagaaacggagtcagccggagaacaaggagtggtcttccactgcctcacaggaggatggaggcccacaacgcgtctgccccattcaacttcaccctgccacccaactttggcaagcgccccacagacctggcactgagcgtcatcctggtgttcatgttgttcttcatcatgctctcgctgggctgcaccatggagttcagcaagatcaaggctcacttatggaagcctaaagggctggccatcgccctggtggcacagtatggcatcatgcccctcacggcctttgtgctgggcaaggtcttccggctgaagaacattgaggcactggccatcttggtctgtggctgctcacctggagggaacctgtccaatgtcttcagtctggccatgaagggggacatgaacctcagcattgtgatgaccacctgctccaccttctgtgcccttggcatgatgcctctcctcctgtacatctactccagggggatctatgatggggacctgaaggacaaggtgccctataaaggcatcgtgatatcactggtcctggttctcattccttgcaccatagggatcgtcctcaaatccaaacggccacaatacatgcgctatgtcatcaagggagggatgatcatcattctcttgtgcagtgtggccgtcacagttctctctgccatcaatgtggggaagagcatcatgtttgccatgacaccactcttgattgccacctcctccctgatgccttttattggctttctgctgggttatgttctctctgctctcttctgcctcaatggacggtgcagacgcactgtcagcatggagactggatgccaaaatgtccaactctgttccaccatcctcaatgtggcctttccacctgaagtcattggaccacttttcttctttcccctcctctacatgattttccagcttggagaagggcttctcctcattgccatattttggtgctatgagaaattcaagactcccaaggataaaacaaaaatgatctacacagctgccacaactgaagaaacaattccaggagctctgggaaatggcacctacaaaggggaggactgctccccttgcacagcctagcccttcccctggtggcctggattctggtcccaaagcaattctgaaagccagtgtggtaaactagagagagcagcaaaaacaccagtcttgcctgagtctttctccagcatttccagtacatctatcagaatcatcaagtcttggccgggaacacagacagggtgtctacccaagaagcctcacctatccccaacttagaatttgctacttattttaaagacttgttcagtgactgtaaactctatgaaaccagaaaccgaatctgcctcttgctgggatctctaaaagtgtctgataagcatcttaaagtcactcaattcctgaactaatcaatatatatgtttaacccattactcaaatacccaaatcccattccaagttttgtgacccaaaagagaaataaatgctcacaagtgctgtagaattaaacttcagaagttctaacctt

SEQ ID NO: 14416 - protein, 349 aa, Homo sapiens
  ref <308>: DATABASE ACCESSION NUMBER: SWISS-Prot / Q14973
  ref <309>: DATABASE ENTRY DATE: 2002-06-15
MEAHNASAPFNFTLPPNFGKRPTDLALSVILVFMLFFIMLSLGCTMEFSKIKAHLWKPKGLAIALVAQYGIMPLTAFVLGKVFRLKNIEALAILVCGCSPGGNLSNVFSLAMKGDMNLSIVMTTCSTFCALGMMPLLLYIYSRGIYDGDLKDKVPYKGIVISLVLVLIPCTIGIVLKSKRPQYMRYVIKGGMIIILLCSVAVTVLSAINVGKSIMFAMTPLLIATSSLMPFIGFLLGYVLSALFCLNGRCRRTVSMETGCQNVQLCSTILNVAFPPEVIGPLFFFPLLYMIFQLGEGLLLIAIFWCYEKFKTPKDKTKMIYTAATTEETIPGALGNGTYKGEDCSPCTA

SEQ ID NO: 14417 - DNA, 3404 bp, Rattus norvegicus
  ref <308>: DATABASE ACCESSION NUMBER: EMBL / M80570
  ref <309>: DATABASE ENTRY DATE: 2000-03-04
gaattcccgcaggagtcagtcgaagaagaaagaagcagagttccttgggctccggtctacccatgagtaagagcaaatgctccgtgggaccaatgtcttcagtggtggccccggctaaagagtccaatgctgtgggccccagagaggtggagctcatcctggtcaaggagcagaacggagtgcagctgaccaactccaccctcatcaacccgccacagacaccagtggaggctcaagagcgggagacctggagcaagaaaattgatttcctgctatcagtcatcggctttgctgtggacctggccaatgtctggaggtttccctacctgtgctacaaaaatggtggaggtgccttcctggtgccctacctgctcttcatggttattgctgggatgcccctcttctacatggagctggctctcggacagttcaacagagaaggagctgctggtgtctggaagatctgtcctgtcctgaaaggtgtgggcttcactgttatcctcatctctttctacgtgggcttcttctacaatgtcatcatcgcatgggcactgcactacttcttctcctccttcaccatggacctcccatggatccactgcaacaacacctggaatagccccaactgctccgatgcccatgccagcaactctagcgacggcctgggcctcaatgacacctttgggaccacacccgctgctgagtactttgagcgtggcgtgctgcaccttcaccagagccgtggcattgatgacctgggccctccacggtggcagctcacagcctgcctggtgctggtcattgttctgctctacttcagcctatggaagggagtaaagacctcagggaaggtggtgtggatcacagctaccatgccctatgtggtcctcacagccctgctcctgcgtggagttacccttcctggagccatggatggcatcagagcatacctcagtgtggacttctaccgactctgtgaggcatctgtgtggatcgatgctgccacccaggtgtgcttctccctcggcgttgggtttggagtgctgattgccttctccagttacaataaattcaccaataactgctatagagacgcaatcatcaccacctccattaactccctgacaagcttctcctctggcttcgtcgtcttctccttcctggggtatatggcacagaagcacaatgtgcccatcagagatgtggccacagatggacctgggctcatcttcatcatctatcctgaggcgatcgccacactcccgctgtcttctgcctgggctgctgtcttcttcctcatgctgctcactctgggtatcgacagtgcaatggggggcatggagtcagtgatcactgggctcgtcgatgagttccagctgctacatcggcatcgagagctcttcactcttggcattgtcctggctactttcctgctgtctctcttctgcgtcaccaacggtggcatctacgtcttcacactgctggaccactttgcagctggcacatctatcctctttggcgtgctcattgaagccattggggtggcctggttctacggcgtccagcaattcagtgatgacatcaagcaaatgacagggcagcgacccaacctgtactggcggctatgctggaagctggtcagcccctgcttcctcctgtatgtggtcgtggtcagcattgtgaccttcagacccccacactatggggcctacatcttcccagactgggccaatgccctgggctggatcatcgccacatcctccatggccatggtgcccatttatgcgacctacaagttctgcagcctgccggggtccttccgggagaaactggcctatgccatcacacctgagaaagaccatcagctagtggacagaggggaggtgcgccaattcacgctgcgtcactggctgttgctgtaaagtggaaggagacagctgccagctgggccacctcacaacagcggggacagggagatcgcaaaggaaacccacgagtcaagaaaggaaggagggccacttccatgcttctcctttgtcgtacggaaaaataatcgaagcatgggcttcaacctttgactgttcacacccaaatcattgccacaaagaagcctctgtctgtgtatggctgtaaaaacatacacctctacacagtgaggtcaacaatgtccctgtccctactgggtgggaaaaccctagctggtatcctgtccctgcaaggctgactcccccatctgtggtcactctgggagaacaggtcatactgccccctgaattctagaaggaccttggtacctgtacatacactgtgccagaatccttgtgctcacagtagttgcctaaaccaattctgttgcttacatttacagtgtcaagtatcctattttgctgttggtagaaaagacagttaatacatgccaagtcctttcctggtgcttggctccgagcagacaccttagcattctgttcacacattacacacacacacacacacacacacacacacacacacacacacacacacacggtctgttctgagccacggaggacaagggacttggtgcaagtgaccagagattatgtttttcctttatagatgagataaataaaattcgtgaaataaggttgggagacacaccctacccctggcccctggaaggcctggtcagcttgcagccactttagtatggacttgtaggccacataaaaagtgtactcttcatagtcagtgtgtcctcaccttctggacacctgctctgcacagggtctcgagataacttgaagaccatattcttggcctagagccctacctggtcttcaaggaaagacacccactgtagggtttgatttcctactggctcctgtcacatcaatggacattatccatgttataaatgactttttaaaaccatatttatgtgtgaatcgaacttactctcaaaatgcaaggttagtttgttcaaatccatttgctgaagagtaattagtgtaagaggaaggtatgccaagaatcaccttcttcccggagcactggctttagttcctggagtgaaaagtggatgtcatgattttccttgagctaataaatgcaaactttggcctggcctgtgtcctatataagtggcaccatgtgtctccctgagagagagtcaaccttagtattctctgcaagtatacattggcacgagggtgttaaatgtgctaccagggtgttaaatgcaggcctgttggctttgagactgtagtatggcagagaaggctccggtttaccatctctcagaggagtggctccatgtagacatccaggtgttgtaagcatctgttttttgtgtctatagccagtaccttgtgtgggttcttacaaacaataaaagaaatatatgttggaaaaaaaaaaaggaattc

SEQ ID NO: 14418 - protein, 620 aa, Rattus norvegicus
  misc_feature (1)..(620): Xaa=Unknown amino acid
MSKSKCSVGPMSSVVAPAKESNAVGPREVELILVKEQNGVQLTNSTLINPPQTPVEAQERETWSKKIDFLLSVIGFAVDLANVWRFPYLCYKNGGGAFLVPYLLFMVIAGMPLFYMELALGQFNREGAAGVWKICPVLKGVGFTVILISFYVGFFYNVIIAWALHYFFSSFTMDLPWIHCNNTWNSPNCSDAHASNSSDGLGLNDTFGTTPAAEYFERGVLHLHQSRGIDDLGPPRWQLTACLVLVIVLLYFSLWKGVKTSGKVVWITATMPYVVLTALLLRGVTLPGAMDGIRAYLSVDFYRLCEASVWIDAATQVCFSLGVGFGVLIAFSSYNKFTNNCYRDAIITTSINSLTSFSSGFVVFSFLGYMAQKHNVPIRDVATDGPGLIFIIYPEAIATLPLSSAWAAVFFLMLLTLGIDSAMGGMESVITGLVDEFQLLHRHRELFTLGIVLATFLLSLFCVTNGGIYVFTLLDHFAAGTSILFGVLIEAIGVAWFYGVQQFSDDIKQMTGQRPNLYWRLCWKLVSPCFLLYVVVVSIVTFRPPHYGAYIFPDWANALGWIIATSSMAMVPIYATYKFCSLPGSFREKLAYAITPEKDHQLVDRGEVRQFTLRHWLLLX

SEQ ID NO: 14419 - DNA, 278 bp, Homo sapiens
  ref <308>: DATABASE ACCESSION NUMBER: EMBL / M96670
  ref <309>: DATABASE ENTRY DATE: 2000-05-05
gctgcactatctcttctcctccttcaccacggagctcccctggatccactgcaacaactcctggaacagccccaactgctcggatgcccatcctggtgactccagtggagacagctcgggcctcaacgacacttttgggaccacacctgctgccgagtactttgaacgtggcgtgctgcacctccaccagagccatggcatcgacgacctggggcctccgcggtggcagctcacagcctgcctggtgctggtcatcgtgctgctctacttcagcctct

SEQ ID NO: 14420 - protein, 620 aa, Homo sapiens
  ref <308>: DATABASE ACCESSION NUMBER: PIR / A48980
  ref <309>: DATABASE ENTRY DATE: 1999-08-20
MSKSKCSVGLMSSVVAPAKEPNAVGPKEVELILVKEQNGVQLTSSTLTNPRQSPVEAQDRETWGKKIDFLLSVIGFAVDLANVWRFPYLCYKNGGGAFLVPYLLFMVIAGMPLFYMELALGQFNREGAAGVWKICPILKGVGFTVILISLYVGFFYNVIIAWALHYLFSSFTTELPWIHCNNSWNSPNCSDAHPGDSSGDSSGLNDTFGTTPAAEYFERGVLHLHQSHGIDDLGPPRWQLTACLVLVIVLLYFSLWKGVKTSGKVVWITATMPYVVLTALLLRGVTLPGAIDGIRAYLSVDFYRLCEASVWIDAATQVCFSLGVGFGVLIAFSSYNKFTNNCYRDAIVTTSINSLTSFSSGFVVFSFLGYMAQKHSVPIGDVAKDGPGLIFIIYPEAIATLPLSSAWAVVFFIMLLTLGIDSAMGGMESVITGLIDEFQLLHRHRELFTLFIVLATFLLSLFCVTNGGIYVFTLLDHFAAGTSILFGVLIEAIGVAWFYGVGQFSDDIQQMTGQRPSLYWRLCWKLVSPCFLLFVVVVSIVTFRPPHYGAYIFPDWANALGWVIATSSMAMVPIYAAYKFCSLPGSFREKLAYAIAPEKDRELVDRGEVRQFTLRHWLKV

SEQ ID NO: 14421 - DNA, 2722 bp, Rattus norvegicus
  ref <308>: DATABASE ACCESSION NUMBER: EMBL / M88111
  ref <309>: DATABASE ENTRY DATE: 2000-03-04
aaaggcgcagagataggaccagtgctcggcgcccgcttggctggctgactgcgctcttgcaagcaccggtgccagctctccaagatgaagaagctccaggaagctcacctccgcaagcctgtcaccccagacctgctgatgactcccagtgaccagggtgatgtggacctggatgtagactttgcagcagacagaggcaactggacgggcaagctggacttcttgctgtcctgcatcggctactgtgtgggcttgggaaatgtctggcggtttccctatcgagcctacaccaatggaggcggagccttcctcgtgccctacttcctcatgctggccatctgtggcatccccctcttctttcttgagctctccctgggccagttctccagcctgggacccctggctgtctggaaaatcagccccctcttcaaaggtgcgggtgcagccatgctgctcatcgtgggcctggtggccatctactacaacatgatcatcgcctacgtcctcttctacctcttcgcctccctcaccagcaacctgccctgggagcattgcggcaactggtggaacacagaacgctgcctggagcacagaggccccaaggatggcaacggggcactgcctcttaacctcagcagcactgtcagccccagtgaggagtactggagccgatatgtcctgcacattcagggcagccagggcatcggccgacccggggagattcgctggaacctctgcctctgcctgctgctggcctgggtcatcgtgtttctctgtatcctgaagggggtgaagtcctcgggcaaggtggtgtatttcacagccacctttccctacctcatcctgctcatgctcctggttcgaggagtgacccttcccggggcctggaagggcatccagttctatctcaccccccaattccaccacctgctgtcttccaaggtgtggattgaagctgctcttcagatcttctactctctaggagtgggttttgggggtcttctcacctttgcctcctacaacacattccaccagaacatctacagagacaccttcattgtcactctgggcaatgccatcaccagcatcctggctggttttgctatcttctcggtgctgggctacatgtcgcaggagctgggtgtgcctgtggaccaagtggccaaagcaggccctggcctggcctttgttatctacccacaggccatgactatgttgcctctgtcacccttctggtccttcctcttcttcttcatgcttctgactcttggcctcgatagccagtttgcctttctggaaaccatagtgactgcagtgaccgatgagttcccatactacctacggcccaagaaggcagtgttctcaggcctcatctgtgtagccatgtacctgatgggactgatcctcaccaccgatggggggatgtactggctggtccttctggatgactacagcgccagcttcggactcatggtggtggtgattaccacatgcctcgctgtcacccgggtatacggcatccagcggttttgtcgtgacatccacatgatgctgggcttcaagccaggactctacttcagggcctgctggctgtttttgtctccggccacactcttggccttgctggtgtacagtatcgtcaagtaccagccctcggaatacggtagctatcgcttccccgcctgggccgagctgctaggcatcctgatgggcctgctctcctgcctcatgatcccagctggcatgctggtagctgtgcttcgagaggagggctcgctctgggagcgacttcagcaagccagccgtcctgctatagactggggcccatcactggaagagaaccggacgggcatgtatgtggccaccctggctgggagccagtcaccaaaaccactgatggtacacatgcgaaaatatgggggcatcaccagcttcgagaatacagccattgaggtggaccgtgagatcgcagaggaggaagaggagtccatgatgtgagaccagacacctccaaacaggagggctggtcggggcctccccgtctgtcccttccttggccacaggggatagctttgtctgttgggattctgacaggcaatgggaggttgccatggcaacgacagtccccagcctaagtccctctttgtggcctctacatctcctggaacctctagatggacatacatatactaggtaacccattcaaagctgaaacgattcagctcagccctcagtttgtgagggggtgcgttgaagccagggagagaagagctggaccaaggtgacatgcccaagaggacttgttcccaagcctcctccagccagtcaactccctttcccttgggggagcaagcaccatatctgacatctttgttcagacactttgacaagatacatttccatacaagccaactttaaaccccaggttcagggtagcgagaacctggagagccccaaggccctggatatagatagaatggcagcgaccaaattgggtagaaaagtctttgtgggttcctgtgttaaggccagttttcccagaagaagtgggagctttagggctgagaggtgtgaaagattgcagaagaggctagagggaaggtttgcgggtcagagctgcccctgagccaggaggaggcccaacctgccagagcagagaccaggaggggctggagattgtggtgctcccgggttatgagagggaataaagactcgcagggcc

SEQ ID NO: 14422 - protein, 637 aa, Rattus norvegicus
  ref <308>: DATABASE ACCESSION NUMBER: SWISS-Prot / P28573
  ref <309>: DATABASE ENTRY DATE: 2001-10-16
MKKLQEAHLRKPVTPDLLMTPSDQGDVDLDVDFAADRGNWTGKLDFLLSCIGYCVGLGNVWRFPYRAYTNGGGAFLVPYFLMLAICGIPLFFLELSLGQFSSLGPLAVWKISPLFKGAGAAMLLIVGLVAIYYNMIIAYVLFYLFASLTSNLPWEHCGNWWNTERCLEHRGPKDGNGALPLNLSSTVSPSEEYWSRYVLHIQGSQGIGRPGEIRWNLCLCLLLAWVIVFLCILKGVKSSGKVVYFTATFPYLILLMLLVRGVTLPGAWKGIQFYLTPQFHHLLSSKVWIEAALQIFYSLGVGFGGLLTFASYNTFHQNIYRDTFIVTLGNAITSILAGFAIFSVLGYMSQELGVPVDQVAKAGPGLAFVIYPQAMTMLPLSPFWSFLFFFMLLTLGLDSQFAFLETIVTAVTDEFPYYLRPKKAVFSGLICVAMYLMGLILTTDGGMYWLVLLDDYSASFGLMVVVITTCLAVTRVYGIQRFCRDIHMMLGFKPGLYFRACWLFLSPATLLALLVYSIVKYQPSEYGSYRFPAWAELLGILMGLLSCLMIPAGMLVAVLREEGSLWERLQQASRPAIDWGPSLEENRTGMYVATLAGSQSPKPLMVHMRKYGGITSFENTAIEVDREIAEEEEESMM

SEQ ID NO: 14423 - DNA, 1911 bp, Homo sapiens
  ref <308>: DATABASE ACCESSION NUMBER: EMBL / S80071
  ref <309>: DATABASE ENTRY DATE: 2000-06-09
atgaagaagctccagggagctcacctccgcaagcctgtcaccccagacctgctgatgacccccagtgaccagggcgatgtcgacctggatgtggactttgctgcacaccgggggaactggacaggcaagctggacttcctgctgtcctgcattggctactgtgtaggcctggggaatgtctggcgcttcccctatcgagcgtacaccaatggaggaggcgccttcctcgtgccctacttcctcatgctggccatctgtggcatccccctcttcttcctggagctctccctgggccagttctccagcctagggcccctggctgtctggaaaatcagccctctcttcaaaggcgccggcgcagccatgctgctcatcgtgggcttggtggccatctactacaacatgatcatcgcctacgtgctcttctacctcttcgcctccctcaccagcgacctaccctgggagcactgtggcaactggtggaacacagaactctgcctggagcacagagtctccaaggacggcaacggggccctgcccctcaacctcacctgcaccgtcagccccagtgaggagtactggagccgctacgtcctccacatccaaggcagccagggcatcggcagccctggggagatccgctggaacctctgcctctgcctgctgctggcctgggtcatcgtgttcctctgtatcctcaagggtgtgaagtcttcgggcaaggtggtgtatttcacggccacgttcccctacctcatcctgctcatgctgctggtccgcggagtcaccctcccaggggcctggaagggcatccagttctatctcaccccccagttccaccacttgttgtcttccaaggtgtggattgaagctgctcttcagatcttctattccctgggtgtgggcttcggggggctcctcacctttgcctcctacaacacgtttcaccagaacatctatagagacaccttcatcgtcactctgggcaacgccatcaccagcatcctggctggctttgccatcttctccgtgctgggctacatgtctcaggagctgggcgtgcctgtggaccaagtagccaaagcaggccctggcctggcctttgtcgtctacccacaggccatgaccatgctgcctctgtcacccttctggtcctttctcttcttcttcatgcttctgactctcggcctagatagccagtttgcctttctggagaccattgtgacagctgtgacagatgagttcccatactacctgcggcccaagaaggcggtgttctcagggctcatctgcgtggccatgtacctgatggggctgatcctcaccactgatgggggcatgtactggctggtccttctggatgactacagcgccagcttcgggctgatggtggtggttatcaccacatgccttgccgtgacacgggtgtatggcattcagaggttctgccgagacatccacatgatgctgggcttcaagccgggcctctacttcagggcctgctggctgttcctgtccccagccacgctcttggccctcctggtgtatagcatcgtcaagtaccagccctcggagtatggcagttaccgcttcccgccctgggctgagctgctgggcatcctgatgggcctgctgtcctgcctcatgatcccagctggcatgctggtggctgtgcttcgagaagagggctcactctgggagcggctccaacaggccagccggccggccatggactggggaccatcgctggaggagaaccggacgggcatgtatgtggccacgctggctgggagccagtcaccaaagccactgatggtgcacatgcgcaagtacgggggcatcaccagcttcgagaacacggccatcgaggtggaccgtgagattgcagaggaggaggagtcgatgatgtga

SEQ ID NO: 14424 - protein, 636 aa, Homo sapiens
  ref <308>: DATABASE ACCESSION NUMBER: SWISS-Prot / Q99884
  ref <309>: DATABASE ENTRY DATE: 2001-10-16
MKKLQGAHLRKPVTPDLLMTPSDQGDVDLDVDFAAHRGNWTGKLDFLLSCIGYCVGLGNVWRFPYRAYTNGGGAFLVPYFLMLAICGIPLFFLELSLGQFSSLGPLAVWKISPLFKGAGAAMLLIVGLVAIYYNMIIAYVLFYLFASLTSDLPWEHCGNWWNTELCLEHRVSKDGNGALPLNLTCTVSPSEEYWSRYVLHIQGSQGIGSPGEIRWNLCLCLLLAWVIVFLCILKGVKSSGKVVYFTATFPYLILLMLLVRGVTLPGAWKGIQFYLTPQFHHLLSSKVWIEAALQIFYSLGVGFGGLLTFASYNTFHQNIYRDTFIVTLGNAITSILAGFAIFSVLGYMSQELGVPVDQVAKAGPGLAFVVYPQAMTMLPLSPFWSFLFFFMLLTLGLDSQFAFLETIVTAVTDEFPYYLRPKKAVFSGLICVAMYLMGLILTTDGGMYWLVLLDDYSASFGLMVVVITTCLAVTRVYGIQRFCRDIHMMLGFKPGLYFRACWLFLSPATLLALLVYSIVKYQPSEYGSYRFPPWAELLGILMGLLSCLMIPAGMLVAVLREEGSLWERLQQASRPAMDWGPSLEENRTGMYVATLAGSQSPKPLMVHMRKYGGITSFENTAIEVDREIAEEEESMM

SEQ ID NO: 14425 - DNA, 1521 bp, Rattus norvegicus
  ref <308>: DATABASE ACCESSION NUMBER: EMBL / M89906
  ref <309>: DATABASE ENTRY DATE: 2000-03-04
attaagcacagtggaagagtttcattctcctctcaaatttcttggattatgccgggtactatcaaagaaaatatcatctttggtgtttcctatgatgagtacagatataagagcgttgtcaaagcttgccaactacaggaggacatcaccaagtttgcagaacaagacaacacagttcttggagaaggtggagtcacactcagtggaggtcaacgtgcaagaatttctttagcaagagcagtatataaagatgctgatttgtacctgttagattcccccttcggatatctagatgttttaactgaagaacaaatatttgaaagttgtgtctgtaaattgatggccagcaaaactaggattctggtcacatctaaaatggagcagttaaagaaagctgacaagatactcattttgcatgagggcagcagctatttttatgggacgttttctgaactacaaagtctacgtccagacttcagttccaaactcatggggtatgatacttttgaccagtttactgaggaaagaaggagttcaattctaactgagaccttacgcaggttctcagtggacgatgcctctaccacctggaacaaagccaaacagtcatttagacagactggagagtttggagaaaaaaggaagaactctattctaagttcattcagctctgtgaagaaaatttccattgtgcaaaagactccattgtccatagaaggagaatctgatgacctccaagaaaggagactgtccctggttccagactctgaacatggagaggccgctctgcctcgcagcaacatgatcaccgccgggcccacgtttccaggcagaagaagacagtctgttttggatcttatgacattcacacccagctcagtctccagcagtctccagaggaccagagcttctattcgaaaaatatccttagcccctcggataagcttaaaggaagaggatatatattcaaggcgattatcgcaagatagcacactgaacatcaccgaagaaattaatgaagaagatttaaaggagtgtttttttgatgatatggtaaagatccccacggtgacaacatggaacacataccttcgatatttcacgctccacagaggcttatttgcagtgctgatttggtgcgtgctggtttttctggttgaggtggctgcttctttatttgtgttgtggttgcttaaaaacaaccccgttaatggtggaaacaatggcactaaaattgccaatacctcctatgttgtggtcatcaccagttccagcttctattacattttttacatttacgtgggagtggctgacactttgcttgctctgagcctcttcagaggtttgcccctggtgcatacgttaatcacagcatcaaaaattttgcacaggaaaatgttacattctattcttcatgcccctatgtcaaccttcaacaagctgaaagcgggtgggattcttaacagattctccaaagatatagcaattttggatgactttctgcctcttaccattttgact

SEQ ID NO: 14426 - protein, 524 aa, Rattus norvegicus
  ref <308>: DATABASE ACCESSION NUMBER: SWISS-Prot / AAA40918
  ref <309>: DATABASE ENTRY DATE: 2002-06-15
MQKSPLEKASFISKLFFIKHSGRVSFSSQISWIMPGTIKENIIFGVSYDEYRYKSVVKACQLQEDITKFAEQDNTVLGEGGVTLSGGQRARISLARAVYKDADLYLLDSPFGYLDVLTEEQIFESCVCKLMASKTRILVTSKMEQLKKADKILILHEGSSYFYGTFSELQSLRPDFSSKLMGYDTFDQFTEERRSSILTETLRRFSVDDASTTWNKAKQSFRQTGEFGEKRKNSILSSFSSVKKISIVQKTPLSIEGESDDLQERRLSLVPDSEHGEAALPRSNMITAGPTFPGRRRQSVLDLMTFTPSSVSSSLQRTRASIRKISLAPRISLKEEDIYSRRLSQDSTLNITEEINEEDLKECFFDDMVKIPTVTTWNTYLRYFTLHRGLFAVLIWCVLVFLVEVAASLFVLWLLKNNPVNGGNNGTKIANTSYVVVITSSSFYYIFYIYVGVADTLLALSLFRGLPLVHTLITASKILHRKMLHSILHAPMSTFNKLKAGGILNRFSKDIAILDDFLPLTILT

SEQ ID NO: 14427 - DNA, 6304 bp, Homo sapiens
  ref <308>: DATABASE ACCESSION NUMBER: Refseq / NM_021050
  ref <309>: DATABASE ENTRY DATE: 2002-01-07
taattggaagcaagtggcgtcacctcaggtctgagtgaaagggacgagccaaaagcattggcctggtcctggatatccagatgttgagtccaacctgggtttagtcgaacacagacctcattgcctcacggagacatcatgcagaagtcgcctttggagaaagccagctttatctccaaactcttcttcagctggaccacaccaattttgaggaaagggtacagacaccacttggagttgtcagacatataccaagccccttctgctgattcagctgaccacttgtctgaaaaactagaaagagaatgggacagagaacaagcttcaaaaaagaatccccagcttatccacgcccttcggcgatgctttttctggagattcctcttctatggaattttgctatacctaggggaagtcaccaaggctgtccagcctgtcttgctaggaagaatcatagcatcctatgatccagaaaacaaggtggaacgttccattgccatttaccttggcataggcttatgccttctcttcattgtcaggacactgcttcttcacccagctatttttggccttcatcgcattggaatgcagatgagaacagctatgtttagcttgatttataagaagactttaaagttgtcaagccgcgttcttgataaaataagtattggacaacttgttagtcttctttccaacaacctgaacaaatttgatgaaggacttgccttggcacattttatatggattgctcctttacaagtgactcttctgatggggcttctctgggacttgttacagttctcagccttctgtggccttggtttactgataatcctggttatttttcaagctatcctagggaagatgatggtgaagtacagagatcagagagctgcaaagatcaatgaaagactcgtgatcacatcagaaattattgataatatctattctgttaaggcatattgttgggaatcagcgatggagaaaatgattgaaaacttgagagaggtggagctgaaaatgacccggaaggcggcctatatgaggttcttcactagctctgccttcttcttttcagggttctttgtagtctttctatctgtgcttccctacacagtcatcaacggaatcgtcctacgaaaaatattcacaaccatttcattctgcattgtcctacgtatgtcagtcacacggcagttccccactgccgtacagatatggtatgattcttttggaatgataagaaaaatacaggatttcctgcagaaacaagagtataaagtactggagtataacttaatgaccacaggcataatcatggaaaatgtaacagcattttgggaggagggatttggggaattactggagaaagtacaacaaagcaatggtgacagaaaacattccagtgatgagaacaatgtcagtttcagtcatctctgccttgtgggaaatcctgtgctgaaaaacatcaatttgaatatagagaaaggagagatgttggctattactggatctactggatcaggaaagacatcactcctgatgttgattttgggagaactggaagcttcagagggaattattaagcacagtggaagagtttcattctgctctcaattttcttggattatgccgggtactatcaaagaaaatatcatctttggtgtttcctatgatgagtacagatataagagtgttgtcaaagcttgccaactacagcaggacatcaccaagtttgcagaacaagacaacacagttcttggagaaggtggagtcacactgagtggaggtcagcgtgcaaggatttctttagcaagagcagtatataaagatgctgatttgtacctattagattccccttttggatatctagatgtttttactgaagaacaagtatttgaaagctgtgtttgtaaattgatggccaacaaaactaggattttggttacatctaaaatggaacacttaaggaaagctgacaaaatactaattttgcatcagggcagtagctatttttatgggacattttctgagctacaaagtctacgtccagacttcagttcgaaactcatggggtatgatacttttgaccagtttactgaggaaagaagaagttcaattctaactgagaccttacgcaggttctcagtagacgattcctctgccccgtggagcaaacccaaacagtcgtttagacagactggagaggtgggagaaaaaaggaagaactctattctaaattcattcagctctgtaaggaaaatttccattgtgcaaaagactccattatgtatcgatggagagtctgatgatctccaagaaaagagactgtccctagttccggattctgaacagggggaggctgctctgccgcgcagcaacatgatcgccaccggccccacatttccaggcagaagaagacagtctgttttggatctgatgacgttcacacccaactcaggctccagcaatcttcagaggaccagaacttctattcgaaaaatctccttagtccctcagataagcttaaatgaagtggatgtatattcaaggagattatcgcaagatagcacactgaacatcactgaagaaattaacgaagaagatttaaaggagtgttttcttgatgatgtgatcaagatacccccggtgacaacatggaacacatacctacgatattttactctccataaaggcttactgctagtgctgatttggtgcgtactggtttttctggttgaggtggctgcttctttatttgtgttatggttgcttaaaaacaaccctgttaacagtggaaacaatggtactaaaatttccaatagctcctatgttgtgatcatcaccagtaccagtttctattatattttttacatttacgtgggagtggctgacactttgcttgccctgagcctcttcagaggtttgccgctggtgcatacgttaatcacagcatcaaaaattttgcacaggaaaatgttacactccattcttcacgcccctatgtcgaccatcagcaagctgaaagcaggtgggattcttaacagattctccaaagatatagcaattttggatgactttctgcctcttaccatttttgacttcattcagttggtgttcattgtgattggagctataatagtcgtctcggcattacaaccctacatcttcctagcaacggtgccagggctagtagtctttattttactgagggcctacttccttcatacagcacagcagctcaaacaactggaatctgaaggcaggagtccaattttcacccaccttgtgacaagcttaaaaggactctggacacttcgagccttccgacgccagacttactttgaaactctgttccacaaagctctgaatttgcacactgccaactggtttatgtatctggcaaccttgcgctggttccaaatgagaatagacatgatatttgtcctcttcttcattgttgttaccttcatctccattttaacaacaggtgaaggagaaggaacagctggtattattctaactttagctatgaatatcatgagtactttgcagtgggctgtgaactcaagcattgatacagatagcttgatgcgatctgtgagcagagtgtttaagtttattgatatacaaacagaagaaagtatgtacacacagataattaaagaactacctagagaaggatcatctgacgttttagtcattaagaatgagcatgtgaagaaaagtgatatctggccctctggaggcgaaatggttgtcaaagaccttactgtgaaatacatggatgatggaaatgccgtattagagaacatttctttttcaataagtcctggacagagggtggggctcttaggaagaactggatcaggaaaaagtactttgctttcagcatttttacgaatgttgaacattaaaggtgatatagagattgatggtgtctcatggaattcagtgaccttacaagaatggaggaaagctttcggagtgataacacagaaagtatttatcttttctggaacattcagacaaaacctggatcccaatggaaaatggaaagatgaagaaatatggaaagttgcagatgaggttggactcaagtctgtaatagagcagtttcctggacagctcaactttacccttgtggatgggggttatgtgctaagccatggccataagcaattaatgtgcttggcccgatcagttctcagtaaggccaagatcatactgcttgatgagcccagtgcccatctagaccccataacataccaagtcattcgacgagttctaaaacaagccttcgctggttgcacagtcatcctctgtgaacacaggatagaagcgatgttggattgccagcgatttttggtcatagaagagagcaatgtctggcagtacgactcccttcaggcacttctgagtgagaagagtatcttccagcaggccattagctcctcggaaaagatgaggttcttccagggccgccactccagcaagcacaagcctcggacgcaaattactgctctgaaagaggagacagaagaagaagttcaagaaacccgtctctagtgctgggatgctgaggaagcaactcagtgcactgagtccattcccagaacccatgcagaatgaaaaaagccaggcatttcccatgcttctaaccccagtgctggggacacagagacaggtggatccctggggctctgtggcaagtgatcctagcccacaaagagagttccaggctgggcacctgagggacaatacctgtggatatactcttgcttccacatgcaagtacatatacacatgcatgcacattagtggacatacacacagaaaagcaaagaagaaggaaagagggaagaaaatagtgcaaataattgcaaaacgatcatgtatggagtctgctcatggacttagaggaggtgaactctactacctgtgcctttgaaagaagggtgaagcctgcgacttgctctttaagagactgttttggaagagagttcaaaaacgttcatatgggtatgggtaactgactttcccagcagtagtcaaattgtttgaacttcagatagttgataatgaccacttgtgtattgcaaggcagatttttctgaaaacatttgccccctaatagtagctgaaaaagcagctataaatgccaaccaggttagtcattcggcttattgttcagtacagctggttaatttgcattattgaagaactgaaattatagtgcttagatatagaacaaagtaaagagaactaaaaacagtgtcttatataactcaaagcccaacttactttcctctaagatatgtattgccttctatacattttctgccccattccaagcaaatgttagaatattatacaaaatactgggtggtattgattgaaagatgcccgacatctggtgatctagtaacccatcaggattaaggatatccaggtcttggaaattaaggttaagaccatctagccttactaccgtacagctaaacattcttattaccagaataagacctaggaaaagaactgtttcagtcccataaagtggcctggataatttccttgatatggaaatcgacacacttatgttcccagaaagcaacagatctttaagacttctgaagtgaaggaaggttgtgttagtgcaaactagtgcagcccagtgccaggtccaggagttaacatgtagacaggccatggactgtgtgggtagatgctcatggaaatgtgcagtagtatgttcatgtgctctcagctagctgtgtgtacttcaaactgtctccacagagttgttggggagacactctgaaaaagaattaattgtgaattagttttatatactttgttttataatttgtgatgcaaatgaaaatttctctgggaaatatttattttagtaataatgtttcaaactcatatataacaatgctgtattttaagaatgattacataatgacttatatttgtataaaataatttttatatttgaaatgttaactttttatagcactagctattttaaaacaggggagtgaggaggacagggatgataaggatcattcaacttcatgttgtgaagacgagctgatgtaaatcttgtacccatctgtgtggttctcagacaacacatgctctcttttaatgcagctttgaagaagatggtaccaaaggttaagacggccccctgatgggcacatcaacttctgaactgcaaactaagctttagaggaatgtattatatttattactgtaatagaatatcatgtgtcaataaaatccttttatttgtgtg

SEQ ID NO: 14428 - protein, 1476 aa, Homo sapiens
  ref <308>: DATABASE ACCESSION NUMBER: Refseq / NP_066388
  ref <309>: DATABASE ENTRY DATE: 2002-01-07
MQKSPLEKASFISKLFFSWTTPILRKGYRHHLELSDIYQAPSADSADHLSEKLEREWDREQASKKNPQLIHALRRCFFWRFLFYGILLYLGEVTKAVQPVLLGRIIASYDPENKVERSIAIYLGIGLCLLFIVRTLLLHPAIFGLHRIGMQMRTAMFSLIYKKTLKLSSRVLDKISIGQLVSLLSNNLNKFDEGLALAHFIWIAPLQVTLLMGLLWDLLQFSAFCGLGLLIILVIFQAILGKMMVKYRDQRAAKINERLVITSEIIDNIYSVKAYCWESAMEKMIENLREVELKMTRKAAYMRFFTSSAFFFSGFFVVFLSVLPYTVINGIVLRKIFTTISFCIVLRMSVTRQFPTAVQIWYDSFGMIRKIQDFLQKQEYKVLEYNLMTTGIIMENVTAFWEEGFGELLEKVQQSNGDRKHSSDENNVSFSHLCLVGNPVLKNINLNIEKGEMLAITGSTGSGKTSLLMLILGELEASEGIIKHSGRVSFCSQFSWIMPGTIKENIIFGVSYDEYRYKSVVKACQLQQDITKFAEQDNTVLGEGGVTLSGGQRARISLARAVYKDADLYLLDSPFGYLDVFTEEQVFESCVCKLMANKTRILVTSKMEHLRKADKILILHQGSSYFYGTFSELQSLRPDFSSKLMGYDTFDQFTEERRSSILTETLRRFSVDDSSAPWSKPKQSFRQTGEVGEKRKNSILNSFSSVRKISIVQKTPLCIDGESDDLQEKRLSLVPDSEQGEAALPRSNMIATGPTFPGRRRQSVLDLMTFTPNSGSSNLQRTRTSIRKISLVPQISLNEVDVYSRRLSQDSTLNITEEINEEDLKECFLDDVIKIPPVTTWNTYLRYFTLHKGLLLVLIWCVLVFLVEVAASLFVLWLLKNNPVNSGNNGTKISNSSYVVIITSTSFYYIFYIYVGVADTLLALSLFRGLPLVHTLITASKILHRKMLHSILHAPMSTISKLKAGGILNRFSKDIAILDDFLPLTIFDFIQLVFIVIGAIIVVSALQPYIFLATVPGLVVFILLRAYFLHTAQQLKQLESEGRSPIFTHLVTSLKGLWTLRAFRRQTYFETLFHKALNLHTANWFMYLATLRWFQMRIDMIFVLFFIVVTFISILTTGEGEGTAGIILTLAMNIMSTLQWAVNSSIDTDSLMRSVSRVFKFIDIQTEESMYTQIIKELPREGSSDVLVIKNEHVKKSDIWPSGGEMVVKDLTVKYMDDGNAVLENISFSISPGQRVGLLGRTGSGKSTLLSAFLRMLNIKGDIEIDGVSWNSVTLQEWRKAFGVITQKVFIFSGTFRQNLDPNGKWKDEEIWKVADEVGLKSVIEQFPGQLNFTLVDGGYVLSHGHKQLMCLARSVLSKAKIILLDEPSAHLDPITYQVIRRVLKQAFAGCTVILCEHRIEAMLDCQRFLVIEESNVWQYDSLQALLSEKSIFQQAISSSEKMRFFQGRHSSKHKPRTQITALKEETEEEVQETRL

SEQ ID NO: 14429 - DNA, 1971 bp, Rattus norvegicus
  ref <308>: DATABASE ACCESSION NUMBER: EMBL / AF056034
  ref <309>: DATABASE ENTRY DATE: 1998-12-14
atgaatgacgtgtcacagaaggcagagattctgctttcttcatctaaacctgtccccaaatcctatgtgccaaaactcggcaagggagatgtaaaggataaatttgaagccatgcagagggccagggaagaaagaaatcaaaggcgatctagagatgaaaagcaaagaagaaaagaacaatatattagagaaagagaatggaacaggagaaagcaggagattaaagacatgctcgcttctgatgaggaagaagagccgtctaaagtagaaaaggcttatgtcccaaagctcacagggacagttaaaggcaaatttgatgaaatggagaaacacagacaggaagaacaaaggaagagaacagaagaggagagaaaacgcagaattgagcaggatctgttagaaaagaggaaaatgcagcgtgaattagcaaaaagagctgagcaggaaggagatgactcactccttataacagtggtccctgccaaatcatacagagcagctgcaaacaggaaggatcctgaggacctggacagagaacacaggaatggaagggttagtcaggaagaagaaaagacaagacatgaagaagagtgcagagctctcaaagaagcaaaatgcctttcattggtcatggatgatgaaacagaggccaaaaaagaatcacgttttcctggaaaattgaaatcaacttttgaagaactggaacgacaaagacaagaaaaccgcaagaagcaagcagaagaggaagcaagacggcgcttagaagaagagaggcgtgcctttgaggaagcaaggcggaacatggtaaacgaggaggatgaaagccaagacacagaaacggtttttaaagagtaccgcccaggaaaactccgactcagttttgaggaaatagaaaggcaaaggagagaagaggaaaaacgaaaggccgaggaggaggcgcgaaggaggatggaggaggagaagaaggcatttgctgaagccaggagaagcatggtattagatgatgattccccagagatttataaagcagtctctcaagaatctctaacgcctggaaaactggaaattaattttgaacaattattaagacaaaaaatggaagaagaaagacgacgaacagaggaagaacggaggcaaaaactagaaatggagaaacaggaatttgaacaactgagacaagaaatgggaaaggaagaagaagaaaatgaaagctttgggttgagtagagaatatgaagaattaattaaattaaaaaggagtggttcaattcaagccaaaaatctaaaaagcaagtttgaaaaaattggacagttgtctgaaaaagaagtacagaaaaagatagaagaagagagagcaaaaaggagagcaattgaccttgaaattaaagagcgagaagcagaaaacttccatgaggatgatgatgttgatgtaaaacctgcaaagaagagtgagtctccctttactcacaaagtgaacatgaaagccagatttgaacaaatggctaaggcaagacaagaagaagagcaaaggagaattgaagaacagaagttactgcggatgcagtttgaacagaaagaaatcgatgcagcacttcagaaaaaaagagaagatgatgaggaagaagaaggtagcattgttaacggctccactactgaagacgaagagcaaaccagatcaggagccccatggttcaaaaagccactaagaaatacctcagttgtagacagtgagccagtgagattcactgtgaaagtgacaggagaacccaagccagaagttacgtggtggtttgaaggagaactactgcaggatggagaagactatcagtacatcgaaagaggagaaacttactgcctgtatttaccagaaactttccccgaagatggaggagaatatatgtgtaaagcagtcaacagtaaaggctcagcagcgagtacctgtattcttaccattgaaatggatgactactag

SEQ ID NO: 14430 - protein, 657 aa, Rattus norvegicus
  misc_feature (1)..(657): Xaa=Unknown amino acid
MNDVSQKAEILLSSSKPVPKSYVPKLGKGDVKDKFEAMQRAREERNQRRSRDEKQRRKEQYIREREWNRRKQEIKDMLASDEEEEPSKVEKAYVPKLTGTVKGKFDEMEKHRQEEQRKRTEEERKRRIEQDLLEKRKMQRELAKRAEQEGDDSLLITVVPAKSYRAAANRKDPEDLDREHRNGRVSQEEEKTRHEEECRALKEAKCLSLVMDDETEAKKESRFPGKLKSTFEELERQRQENRKKQAEEEARRRLEEERRAFEEARRNMVNEEDESQDTETVFKEYRPGKLRLSFEEIERQRREEEKRKAEEEARRRMEEEKKAFAEARRSMVLDDDSPEIYKAVSQESLTPGKLEINFEQLLRQKMEEERRRTEEERRQKLEMEKQEFEQLRQEMGKEEEENESFGLSREYEELIKLKRSGSIQAKNLKSKFEKIGQLSEKEVQKKIEEERAKRRAIDLEIKEREAENFHEDDDVDVKPAKKSESPFTHKVNMKARFEQMAKARQEEEQRRIEEQKLLRMQFEQKEIDAALQKKREDDEEEEGSIVNGSTTEDEEQTRSGAPWFKKPLRNTSVVDSEPVRFTVKVTGEPKPEVTWWFEGELLQDGEDYQYIERGETYCLYLPETFPEDGGEYMCKAVNSKGSAASTCILTIEMDDYX

SEQ ID NO: 14431 - DNA, 2202 bp, Homo sapiens
gtgttagcggccagagctcccagacccctacccacagccaggcgggacgcgcacagtccctccacgcggaaagaagtaccttcgccggtcaccggctcctgcagggtgcaaatatatacagagcttcataatcagcccaagaccacatagagcaaacatgaatgatatttcccaaaaggctgagattaaagaaatgcttgcttctgatgatgaggaagatgtatcttctaaagtagaaaaggcttatgttccaaaattaacaggaactgtgaagggtagatttgctgaaatggagaaacaaagacaagaggaacaaaggaagagaacggaggaggaacgaaaacgcagaattgagcaggatatgttagaaaagaggaaaatacagcgtgaattagcaaaaagggctgaacagattgaggacataaacaatacgggaactgaatcagcatcagaggaaggagatgattcactacttataactgtggtacctgtcaaatcatataaaacatctggaaaaatgaaaaagaattttgaggatctagaaaaagaacgtgaagagaaagaaaggatcaagtacgaggaagataaaagaataagatatgaagaacaacgaccatctctcaaggaagcaaagtgtctttcattagttatggatgatgaaatagaaagtgaagcaaaaatttttaaagggtaccgccctggtaaactcaaactcagttttgaagaaatggaaaggcaaagaagagaagatgaaaaaaggaaagcagaagaagaagccagaaggagaatagaggaagaaaagaaggcgtttgctgaagcaaggagaaatatggtagtagatgatgactccccagagatgtataagacaatctctcaagaatttcttacaccgggaaaactggaaattaattttgaagaattattaaaacaaaaaatggaagaagaaaaacgacgaacagaggaggaacggaagcataagctagaaatggagaaacaagaatttgaacaactgagacaggaaatgggagaggaagaggaagaaaatgaaacctttggattgagcagagaatatgaagaactgatcaaattaaaaaggagtggctctattcaagctaaaaacctaaaaagcaagtttgaaaaaattggacagttgtctgaaaaagaaatacagaaaaaaatagaagaagagcgagcaagaaggagagcaattgaccttgaaattaaagagcgagaagctgaaaattttcatgaggaagatgatgttgatgttaggcctgcaagaaaaagcgaggctccatttactcacaaagtgaatatgaaagctagatttgaacaaatggctaaggcaagagaagaagaagaacaaagaagaattgaagaacaaaagttactacgcatgcagtttgaacaaagggaaattgatgcagcactacaaaagaaaagagaagaggaggaggaggaagaaggtagcatcatgaatggctccactgctgaagatgaagagcaaaccagatcaggagctccatggttcaagaagcctcttaaaaacacatcagttgtagacagtgagccagtcagatttacggttaaagtaacaggagaacccaaaccagaaattacatggtggtttgaaggagaaatactgcaggatggagaagactatcaatatattgaaaggggagaaacttactgcctttacttaccagaaactttcccagaagatggaggagagtatatgtgtaaagcagtcaacaataaaggatctgcagctagtacctgtattcttaccattgaaagtaagaattaatcactctttttatcttttattctattaatttttttttccttaaaatcacttttcttcttctcttttttagctgatgactactagctcccctcccctctccctggaactttctctttcactccaactttcttactacatccatcttttctgtggcggggccaaaaaaggaaaccaggagtgccactatgctgacttcttattccttttcataacagtcttcaaagcacagctcatctaaagaatgcctacttcttttccaaataagcatcagatttatcgcctattatgcagtaacagtcaataaaatgtacttatgggggggaattactcaattattctatcagaacctattataaagactgtatttcccatagacgtttacagcaactatgttt

SEQ ID NO: 14432 - protein, 505 aa, Homo sapiens
MEKQRQEEQRKRTEEERKRRIEQDMLEKRKIQRELAKRAEQIEDINNTGTESASEEGDDSLLITVVPVKSYKTSGKMKKNFEDLEKEREEKERIKYEEDKRIRYEEQRPSLKEAKCLSLVMDDEIESEAKIFKGYRPGKLKLSFEEMERQRREDEKRKAEEEARRRIEEEKKAFAEARRNMVVDDDSPEMYKTISQEFLTPGKLEINFEELLKQKMEEEKRRTEEERKHKLEMEKQEFEQLRQEMGEEEEENETFGLSREYEELIKLKRSGSIQAKNLKSKFEKIGQLSEKEIQKKIEEERARRRAIDLEIKEREAENFHEEDDVDVRPARKSEAPFTHKVNMKARFEQMAKAREEEEQRRIEEQKLLRMQFEQREIDAALQKKREEEEEEEGSIMNGSTAEDEEQTRSGAPWFKKPLKNTSVVDSEPVRFTVKVTGEPKPEITWWFEGEILQDGEDYQYIERGETYCLYLPETFPEDGGEYMCKAVNNKGSAASTCILTIESKN

SEQ ID NO: 14433 - DNA, 662 bp, Rattus norvegicus; identical to SEQ ID NO: 13079
  misc_feature (1)..(662): n=a, c, g or t
  ref <308>: DATABASE ACCESSION NUMBER: EMBL / AA799464
  ref <309>: DATABASE ENTRY DATE: 2000-03-03

SEQ ID NO: 14434 - DNA, 18678 bp, Homo sapiens; identical to SEQ ID NO: 13080
  ref <308>: DATABASE ACCESSION NUMBER: EMBL / AB026906
  ref <309>: DATABASE ENTRY DATE: 1999-12-10

SEQ ID NO: 14435 - protein, 159 aa, Homo sapiens; identical to SEQ ID NO: 13081
  ref <308>: DATABASE ACCESSION NUMBER: SWISS-Prot / BAA81889
  ref <309>: DATABASE ENTRY DATE: 2002-06-15

SEQ ID NO: 14436 - DNA, 2827 bp, Rattus norvegicus
  ref <308>: DATABASE ACCESSION NUMBER: Refseq / NM_010757
  ref <309>: DATABASE ENTRY DATE: 2002-11-04
tgggttggggtgacggcgggcggcgggtggcagggacttgttgttcttcgccgagtcggaacgagaagtccgaagcgcgcaggcggagacggcgactaaggggagcgcgagagcagaagcgcttgtgaaagagtgcgtgtccgcaaggagccgccgcgcccggccccgcgcgcgacccggctacgattttctggtggttccgtcctggtgacagggcccgggttatgacgactaatcccaagcccaacaaggcattgaaggtcaagaaggaggcgggtgagaacgcccctgttcttagcgatgatgagctggtgtccatgtcagtgcgggagctaaaccagcacctgcgggggctcaccaaggaggaggtcactcggctgaagcagcggcggcgcacactcaagaacagaggctacgcggctagctgtcgcatcaagcgtgtgacacagaaagaggagctggaacggcagcgtgtggagctacagcaggaggtggagaagctggctcgagagaacagcagcatgcggctggagctagatgccctgcgctccaagtatgaggccctacagaccttcgctcgcaccgtggcccgagggcctgtcacacccaccaaggtggccaccaccagtgtcatcaccatcgtcaaatctgccgagctctcctccacctctgtacccttctcagccgcctcctagtgtctgctggggccgggcagggtgcgggcagtggcacagccctcatgcctatcccaggctccctggcacagattcctcatgtctacctgcccactgtgaaccctgcggggctgagggcagggacagcaggaacagcagggacagcagatgcaggataaaagggaagctctcaggagccagtgcctcaagcaacgccctctcaaatctctccttcccctgggggtgtgtttttaggagctggcaggaaccacatggccaaccaggatgaacaactctaggcccctgcagcagagtgtgaggactcggtcttccacttctccggtgcctgcttgtcagcaccgttggtgccgtcccctctaagggcctccagctggggtagacaccattctgcctgtccctttctgggcttgggccttcttgtccttatcaaagggcgctacaacctgctttagctcttagagccaggctcatgtcctgggaaacacttgcaggggctaatgtctgtgttcctgtgtgtacacaggctaccatcacagcctgtggagactggaaaccgatgccaggtggccacatgggagagcctgtccagtatgtgcgccgagggttgcatgaatgtcatggagtgtccctggaggtctggtagactgcccattgtggtgctgcaggggccgcctgtccacagagccagcaaacagccaggctggggttctctggggcttagcagaggggagagagagagaggagcaggtgaagcctgagaggtgctgagagatgtcgctggcaggtgagacgtgtgttgctgcaaaaagaacaggaacgaagtagacagggatagtgcggagtcctggcagtcgaggtccaggggatgtggaagaggcctgagaggcatagtattaagggacagagactgagtccggagggccttgtggacacacccatggtaggcaggtcagcaaggaccccaggcagactgtaagttgcaaatactctgcatctttggtgcccacttgttacctaagccttttcctccttcatagagctctggggccactggacatcttgcgcttttttactgaaggaatcgtgtcctccaggtcctggggaatatggtagacagggagtcaggggcaggctgagtcacagccaggcacttagaaagcaagcactgttggaaccatagccttggtaggtaatccatattggatatcaataaggaccatggatatttaaagagagaagatattatatatatataattatacacacattttatcgtacagatttttcataacaattttctttcccagtttgatactgtagatctttattaatgcagagtaggttggacggtggggtggggaacgaaggcccagggtgccaacagccttcctcagtctttcctgcggtggcactgggcagctgggtcactggtgaagcctgctccagcacgtgtcacgctggatgagtacagtggtaggcagatgaccactgactgtcatcttttctgtggtggcactgggcatgctgggccactggtgaagcctgctccagcacgtgtcacactggatgagtacagtggtaggcagatgaccactgactgtggcttgctgcccacgcctggcctgtggtggtcttcctgggcggaggctccatattcttggcctccagggtagacagggctgtcagtgctacccggagcacccgtgcagggcacctgcctggaggggctgggaagggtgtgagtgcgccccatggcactgtgtcactgaaatttcattgtcacaatttaatatatggacatttttatttaaagataaaagtgagttttctgtcttgttcctttgacttctgaaagtaagctttaactttttcaaaaggtgacagggacacatgctgaccacgcagagacctggcatcctcagccacctgccacttggcaatttcatttcaatatttatttttttgtgcttttttttccctaccatgttataaattattgagaaaagatcaagatcacagactgttggccccctgtctgccccctgcctcatggccaccacctaatttattgctgtacatgttgccgtgactgcttttgtatctttgcaataaagaatttcctgtttgggatg

SEQ ID NO: 14437 - protein, 156 aa, Rattus norvegicus
  ref <308>: DATABASE ACCESSION NUMBER: Refseq / NP_034887
  ref <309>: DATABASE ENTRY DATE: 2002-11-04
MTTNPKPNKALKVKKEAGENAPVLSDDELVSMSVRELNQHLRGLTKEEVTRLKQRRRTLKNRGYAASCRIKRVTQKEELERQRVELQQEVEKLARENSSMRLELDALRSKYEALQTFARTVARGPVTPTKVATTSVITIVKSAELSSTSVPFSAAS

SEQ ID NO: 14438 - DNA, 4246 bp, Homo sapiens; identical to SEQ ID NO: 6007
  misc_feature (1)..(4246): n=a, c, g or t
  ref <308>: DATABASE ACCESSION NUMBER: EMBL / AF055376
  ref <309>: DATABASE ENTRY DATE: 1999-06-30

SEQ ID NO: 14439 - protein, 403 aa, Homo sapiens
  ref <308>: DATABASE ACCESSION NUMBER: SWISS-Prot / AAC27037
  ref <309>: DATABASE ENTRY DATE: 2002-06-15
MASELAMSNSDLPTSPLAMEYVNDFDLMKFEVKKEPVETDRIISQCGRLIAGGSLSSTPMSTPCSSVPPSPSFSAPSPGSGSEQKAHLEDYYWMTGYPQQLNPEALGFSPEDAVEALISNSHQLQGGFDGYARGAQQLAAAAGAGAGASLGGSGEEMGPAAAVVSAVIAAAAAQSGAGPHYHHHHHHAAGHHHHPTAGAPGAAGSAAASAGGAGGAGGGGPASAGGGGGGGGGGGGGGAAGAGGALHPHHAAGGLHFDDRFSDEQLVTMSVRELNRQLRGVSKEEVIRLKQKRRTLKNRGYAQSCRFKRVQQRHVLESEKNQLLQQVDHLKQEISRLVRERDAYKEKYEKLVSSGFRENGSSSDNPSSPEFFITEPTRKLEPSVGYATFWKPQHRVLTSVFTK

SEQ ID NO: 14440 - DNA, 615 bp, Rattus norvegicus
  ref <308>: DATABASE ACCESSION NUMBER: EMBL / AA799792
  ref <309>: DATABASE ENTRY DATE: 2000-03-03
agagactcagtgatggctgtcacgaccggaggggggactctcagcctttccagacacttaagtattcgtcaaagagtcaccccagcagtggtgatcacagacatgaaaagatgcgagacgccgcagatccttcaccaccaaacaaaatgttgcggagatctaatagtcctgaaaacaaatacagtgacaacacaggtcacaataaggccaaaaatgtgcatactcaaagagttagagaaagggaaggtgggaccagttactctccacaagaaaactcacacaaccacagtgctcttcatagttcaaattcacattcttctaatccaagcaataatccgagcaaagcttctgatgcaccttatgattctgcagatgattggtctgagcacattagctcatctggaaaaaaatactactacaattgtcgcacagaagtttcacagtgggagaaaccaaaagagtggcttgaaagagaacagagacaaaaagaagcaaataagttggcagttaatagtttcccaaaagacagggattacagaagagaggtgatgcaagcagcagccactagtgggttcaccagtggaatggaagacaagcattccagcgatgccagta

SEQ ID NO: 14441 - protein, 612 aa, Rattus norvegicus
  ref <308>: DATABASE ACCESSION NUMBER: SWISS-Prot / P07882
  ref <309>: DATABASE ENTRY DATE: 1996-10-01
MGRLEVLFLGLTCCLAAACAAKLGAVYTEGGFVEGVNKKLSLLGGDSVDIFKGIPFATAKTLENPQRHPGWQGTLKATDFKKRCLQATITQDDTYGQEDCLYLNIWVPQGRKQVSHDLPVMVWIYGGAFLMGSGQGANFLKNYLYDGEEIATRGNVIVVTFNYRVGPLGFLSTGDANLPGNFGLRDQHMAIAWVKRNIAAFGGDPDNITIFGESAGAASVSLQTLSPYNKGLIRRAISQSGVALSPWAIQENPLFWAKTIAKKVGCPTEDTAKMAGCLKITDPRALTLAYRLPLKSQEYPIVHYLAFIPVVDGDFIPDDPINLYDNAADIDYLAGINDMDGHLFATVDVPAIDKAKQDVTEEDFYRLVSGHTVAKGLKGTQATFDIYTESWAQDPSQENMKKTVVAFETDILFLIPTEMALAQHRAHAKSAKTYSYLFSHPSRMPIYPKWMGADHADDLQYVFGKPFATPLGYRAQDRTVSKAMIAYWTNFAKSGDPNMGNSPVPTHWYPYTTENGNYLDINKKITSTSMKEHLREKFLKFWAVTFEMLPTVVGDHTPPEDDSEAAPVPPTDDSQGGPVPPTDDSQTTPVPPTDNSQAGDSVEAQMPGPIGF

SEQ ID NO: 14442 - DNA, 496 bp, Rattus norvegicus
  misc_feature (1)..(496): n=a, c, g or t
  ref <308>: DATABASE ACCESSION NUMBER: EMBL / AA799883
  ref <309>: DATABASE ENTRY DATE: 2000-03-03
ttggttcagacttctagagtctgacccagggctgtttattttaggtatatttaagtacagtaaattttggagggaaaaatatttcctggtataccacaatctcaggagaacaaggaggaatgattacattgaaactcttatcaaagtacaagtcacttctacattgagaatggattctatagatagactacttgtgttgtcttaatggcctaagggaggatctggtgtggtctcagtcatacagataaagtcttctagactattatccacctccagtcctgggtgtggaagagaccacacccagaccacgagaccctggccatacagacagtgcaaggaactaagccattaactaactccaagaagaaaacaggttatacatccctggttttcccatcatgagtgtaaggatccttgaactctccacatcttctcccttctctattttaaaggaaaaatantggatgtaatanaggccaagattgaatgcattacc

SEQ ID NO: 14443 - DNA, 628 bp, Rattus norvegicus
  misc_feature (1)..(628): n=a, c, g or t
  ref <308>: DATABASE ACCESSION NUMBER: EMBL / AA800005
  ref <309>: DATABASE ENTRY DATE: 2000-03-03
gactgcttatacatttattgagcacctgtcacacagcaggagcatctgtgggcatctgggatacagcagtgaatgaaaacagccatgctccattcagagatgctcccaaaagagacagtgtacaggaacgtggaacatttacatagtgttatcagtagtaggaaaagcccagggctgaggccgttaggagcaagaggcctgtgtggaaaggacagcatacagtgtgggattccagttcccctaagcttgccctatctgagggttcctggcagcaggcatgaaaggtgcctagcccaaccagaaaggccccttcccacctgctcttacccaccgtgtagtggtatgctcggattctccccagacttactgcagatcacagctacccaaagggaagcagtctacataagaggcacttctgtcaagtaatctaaaccctactctactagccaggcctagcccaacactggcatacatgccccctcttgttaatgctggggcaagtacgctgcctcaagctttgggactttggtgtgcannggaaagcacttgaagctacacggaggtggagccacaggggacatggtaatggcatgagggcagccctcgtgccgaatttctgggctcgagg

SEQ ID NO: 14444 - protein, 253 aa, Rattus norvegicus
  ref <308>: DATABASE ACCESSION NUMBER: SWISS-Prot / Q9QZA6
  ref <309>: DATABASE ENTRY DATE: 2002-06-15
MGEFNEKKATCGTVCLKYLLFTYNCCFWLAGLAVMAVGIWTLALKSDYISLLASSTYLATAYILVVAGVVVMVTGVLGCCATFKERRNLLRLYFILLLIIFLLEIIAGILAYVYYQQLNTELKENLKDTMIKRYHQSGHEGVTNAVDKLQQEFHCCGSNNSRDWRDSEWIRSGEADSRVVPDSCCKTVVTGCGKREHASNIYKVEGGCITKLESFIQEHLRVIGAVGIGIACVQVFGMIFTCCLYRSLKLEHY

SEQ ID NO: 14445 - DNA, 1458 bp, Homo sapiens
  ref <308>: DATABASE ACCESSION NUMBER: EMBL / U14650
  ref <309>: DATABASE ENTRY DATE: 1999-07-02
tcgcccccgcagctgccgccgccgccagggcccggactcggacgcgtggtagccccaggatgggtgagttcaacgagaagaagacaacatgtggcaccgtttgcctcaagtacctgctgtttacctacaattgctgcttctggctggctggcctggctgtcatggcagtgggcatctggacgctggccctcaagagtgactacatcagcctgctggcctcaggcacctacctggccacagcctacatcctggtggtggcgggcactgtcgtcatggtgactggggtcttgggctgctgcgccaccttcaaggagcgtcggaacctgctgcgcctgtacttcatcctgctcctcatcatctttctgctggagatcatcgctggtatcctcgcctacgcctactaccagcagctgaacacggagctcaaggagaacctgaaggacaccatgaccaagcgctaccaccagccgggccatgaggctgtgaccagcgctgtggaccagctgcagcaggagttccactgctgtggcagcaacaactcacaggactggcgagacagtgagtggatccgctcacaggaggccggtggccgtgtggtcccagacagctgctgcaagacggtggtggctctttgtggacagcgagaccatgcctccaacatctacaaggtggagggcggctgcatcaccaagttggagaccttcatccaggagcacctgagggtcattggggctgtggggatcggcattgcctgtgtgcaggtctttggcatgatcttcacgtgctgcctgtacaggagtctcaagctggagcactactgaccctgccttgggccttgctgctgctgcacccaactactgagctgagaccactgagtaccaggggctgggctccctgatgacacccaccctgtgccatcaccataacctctggggaccccaacctcagaggcagcttcaagtgccttttgctgcgcaccaatgcccagcaggggaggtgaggggggctggcggggcgaagtttggggggtgttttgtggggctccccggacatactctctgcctggtggtcagatgcaggttggaaggggccttgctgagtggcgcaaggccgagcgttcccagcagggggagaaacccttcacaccccaggcccttcaggaactggggctttgccttgcagccacatggccccatcccagttggggaagccaggtgagctctgacccttgggcctgggcctctgcccctcccaacccagccgtcgtctccctcgacagcgcccctgctgtcttccccaccgcagtcaccaccacccgaaatgccacgtggtcactgtgcactgccctgttcatgtgcctctgcggggcagggccttcctggttttgtacactgctgtacccagatgcctacaaccatccctgccacatacaggtgctcaataaacacttgtagagca

SEQ ID NO: 14446 - protein, 253 aa, Homo sapiens [sequence omitted]

SEQ ID NO: 14447 - DNA, 582 bp, Rattus norvegicus; identical to SEQ ID NO: 13138
  ref <308>: DATABASE ACCESSION NUMBER: EMBL / AA800210
  ref <309>: DATABASE ENTRY DATE: 2000-03-03

SEQ ID NO: 14448 - DNA, 698 bp, Rattus norvegicus
  ref <308>: DATABASE ACCESSION NUMBER: EMBL / AA800277
  ref <309>: DATABASE ENTRY DATE: 2000-03-03
caagtaaatttgaagtttattggctgatgggacagctgccatgttgcagccctgctgttctgcagagggaagcaagcctacattcaccaagtaagactgtggctctctgttaagagagacattttgtttgtacagaatgtgttttctctttaggaactctgggagataggtagtagtgacagtttccagaaggctgctgtttctgatgtcttcttggccttcacatggctcaaaccttgtcttcgtcagctctccgacatcttgtcaagaatcagtagcggggcaagaattcttgctctgttagtttccacaatgcagccatttaacaccatctcatccaaaatgatgtggactttgtccaaattaaacattatatctagttcactcactctgctgaagtattcatctaaaacttccacaaaattgtgtatgaattcatagatagccatctcattctccgtgtcattaactccaaccacaacaaagagagctgcgtattgccggtagatcaatttgaaatccttgtattcaatgaacgagcattgttcactggatcgggacaggcagctcttgctgacctcggtttccagaagtgcacgtttattaatgtctacatgctcatagtacttagacagccgggtctgcccttgtctgttcaccataaggaagaacttgatcatttttttcgcctttggcca

SEQ ID NO: 14449 - protein, 142 aa, Rattus norvegicus
  ref <308>: DATABASE ACCESSION NUMBER: SWISS-Prot / Q00380
  ref <309>: DATABASE ENTRY DATE: 2001-10-16
MIRFILIQNRAGKTRLAKWYMQFDDDEKQKLIEEVHAVVTVRDAKHTNFVEFRNFKIIYRRYAGLYFCICVDVNDNNLAYLEAIHNFVEVLNEYFHNVCELDLVFNFYKVYTVVDEMFLAGEIRETSQTKVLKQLLMLQSLE

SEQ ID NO: 14450 - DNA, 825 bp, Homo sapiens
  ref <308>: DATABASE ACCESSION NUMBER: EMBL / X97074
  ref <309>: DATABASE ENTRY DATE: 1996-04-30
aagcttgatagcaagttcagcctggttaagtccaagctgaattccgtgcaccctgagccggagctgcccagtcgccgcgggaccggggccgctggggtctggacgggggtcgccatgatccgctttatcctcatccagaaccgggcaggcaagacgcgcctggccaagtggtacatgcagtttgatgatgatgagaaacagaagctgatcgaggaggtgcatgccgtggtcaccgtccgagacgccaaacacaccaactttgtggagttccggaactttaagatcatttaccgccgctatgctggcctctacttctgcatctgtgtggatgtcaatgacaacaaactggcttacctggagggcattcacaacttcgtggaggtcttaaacgaatatttccacaatgtctgtgaactggacctggtgttcaacttctacaaggtttacacggtcgtggacgagatgttcctggctggcgaaatccgagagaccagccagacgaaggtgctgaaacagctgctgatgctacagtccctggagtgagggcaggcgagcaccccaccccggccccggcccctcctggaatcgcctgctcgcttccccttcccaggcccgtggccaacccagcagtccttccctcaactgcctaggaggaagggacccagctgggtctgggccacaagggaggagacttcaccccacttcctctgggccctggctgtgggcagaggccaccgtgtgtgtcccgagtaaccgtgccgttgtcgtgtgattccataagcgtctgtgcgtggagtccccaataaacctgtggtcctgcctggc

SEQ ID NO: 14451 - protein, 142 aa, Homo sapiens
  ref <308>: DATABASE ACCESSION NUMBER: SWISS-Prot / P53680
  ref <309>: DATABASE ENTRY DATE: 2001-10-16
MIRFILIQNRAGKTRLAKWYMQFDDDEKQKLIEEVHAVVTVRDAKHTNFVEFRNFKIIYRRYAGLYFCICVDVNDNKLAYLEGIHNFVEVLNEYFHNVCELDLVFNFYKVYTVVDEMFLAGEIRETSQTKVLKQLLMLQSLE

SEQ ID NO: 14452 - DNA, 620 bp, Rattus norvegicus
  ref <308>: DATABASE ACCESSION NUMBER: EMBL / AA818240
  ref <309>: DATABASE ENTRY DATE: 2000-03-03
tttttttttttttttttaagggttgtatgtttatttaaaaaatttaaagggaaaatatatgtgcaaattaagtaaagacagaagcaggcagaaaggggctcttctgtgtactgcaaactctaataactctggggccatactaatacataccctttgggatttctaatcatccacccttcccattaatattgtatgccttcactatgaaaactgttaacaaaacttgcttcataaagttttattgatggcatttatcccatggtttaacatgttaattatactgtaataaacatggctttaatattaaactttttccttattatccaaagtcaccacagtccatttcagtaaatataaaaatatatgcttaatactttgtacaatactggtttttggtccaaacaaaactggatcagaaaagccaataaattcaactttaagaatccccaatttttttttaaagatttccaaatggatttaggcaactttgaataatgggatttacataataaaatctgagacaagactaaacaaacaacaaaaatatgtctaacataaaattaaaatttcaagttcacagatttatgttatgccaaaaaagtacagaaacaaaattgtat

SEQ ID NO: 14453 - protein, 1468 aa, Rattus norvegicus
  ref <308>: DATABASE ACCESSION NUMBER: SWISS-Prot / P49791
  ref <309>: DATABASE ENTRY DATE: 2002-06-15
MASGAGGIGGGGGGGKIRTRRCHQGPVKPYQQGRPQHQGILSRVTESVKNIVPGWLQRYFNKSENACSCSVNADEVPRWPENREDEREIYVDENTNTDDGRTTPEPTGSNTEEPSTTSTASNYPDVLTRPSLHRSHLNFSVLESPALHCQPSTSSAFPIGSSGFSLVKEIKDSTSQHDDDNISTTSGFSSRASEKDIAVSKNTSLPPLWSPEAERSHSLSQHTAISSKKPAFNLSAFGTLSTSLGNSSILKTSQLGDSPFYPGKTTYGGAAAAVRQNKVRSTPYQAPVRRQMKAKQLNAQSYGVTSSTARRILQSLEKMSSPLADAKRIPSAVSSPLNSPLDRSGIDSTVFQAKKEKVDSQYPPVQRLMTPKPVSIATNRTVYFKPSLTPSGDLRKTNQRIDKKNSTVDEKNISRQNREQESGFSYPNFSIPAANGLSSGVGGGGGKMRRERTTHFVASKPSEEEEVEVPLLPQISLPISSSSLPTFNFSSPAISAASSSSVSPSQPLSNKVQMTSLGSTGNPVFTFSSPIVKSTQADVLPPASIGFTFSVPLAKTELSGPNSSSETVLSSSVTAQDNTVVNSSSSKKRSAPCEDPFTPAKILREGSVLDILKTPGFMSPKVDSPALQPTTTSSIVYTRPAISTFSSSGVEFGESLKAGSSWQCDTCLLQNKVTDNKCIACQAAKLPLKETAKQTGIGTPSKSDKPASTSGTGFGDKFKPAIGTWDCDTCLVQNKPEAVKCVACETPKPGTGVKRALPLTVASESPVTASSSTTVTTGTLGFGDKFKRPVGSWECPVCCVSNKAEDSRCVSCTSEKPGLVSASSSNSVPVSLPSGGCLGLDKFKKPEGSWDCEVCLVQNKADSTKCIACESAKPGTKSEFKGFGTSSSLNPAPSAFKFGIPSSSSGLSQTFTSTGNFKFGDQGGFKLGTSSDSGSTNTMNTNFKFPKPTGDFKFGVLPDSKPEEIKNDSKNDNFQFGPSSGLSNPASSAPFQFGVSTLGQQEKKEELPQSSSAGFSFGAGVANPSSAAIDTTVTSENKSGFNFGTIDTKSVSVTPFTYKTTEAKKEDASATKGGFTFGKVDSAALSSPSMFVLGRTEEKQQEPVTSTSLVFGKKADNEEPKCQPVFSFGNSEQTKDESSSKPTFSFSVAKPSVKESDQLAKATFAFGNQTNTTTDQGAAKPAFSFLNSSSSSSSTPATSSSASIFGSSTSSSSPPVAAFVFGQASNPVSSSAFGNSAESSTSQPLLFPQDGKPATTSSTASAAPPFVFGTGASSNSTVSSGFTFGATTTSSSSGSFFVFGTGHSAPSASPAFGANQTPTFGQSQGASQPNPPSFGSISSSTALFSAGSQPVPPPTFGTVSSSSQPPVFGQQPSQSAFGSGTANASSVFQFGSSTTNFNFTNNNPSGVFTFGASPSTPAAAAQPSGSGGFSFSQSPASFTVGSNGKNMFSSSGTSVSGRKIKTAVRRKK

SEQ ID NO: 14454 - DNA, 5487 bp, Homo sapiens
  ref <308>: DATABASE ACCESSION NUMBER: EMBL / Z25535
  ref <309>: DATABASE ENTRY DATE: 1994-04-07
atggcctcaggagccggaggagtcggagggggcggtggcggcaagatccggacgcggcgttgccaccaggggccaattaagccttaccagcaggggcgacaacagcatcagggcattcttagcagggttacagaatctgttaagaatattgtgccagggtggttacaaagatacttcaacaagaatgaagatgtatgcagctgttcaacagacacaagcgaggttccacgctggccagaaaataaagaggaccatctggtatatgccgatgaggagagctctaatattactgatgggagaatcacacctgagccagcagtcagtaatacagaagaaccttcaacaactagtactgcttcaaattatccagatgtgttaacaaggccttctcttcatcggagccatctgaatttttccatgttggaatcccctgcattacactgtcagccatctacatcctcggcattcccaattggcagttcgggattttcccttgtaaaggaaattaaagattctacctctcagcatgatgatgataacatctcaactaccagtggtttttcttcaagagcttctgataaagatataactgtttcaaagaacacttcattgccacctctgtggtccccagaagctgaacgttctcactcactctcacagcacactgccaccagctcaaaaaaaccagcattcaacttgtctgcctttggaacactttccccttcacttgggaattcttcaatccttaaaaccagtcagcttggagattctcctttttatcctggaaaaacaacatacggtggggcagcagctgctgtaagacagtctaaactacgaaatacaccttatcaggcaccagttagaagacaaatgaaagctaagcaactcagtgcacaatcttacggtgtgaccagttcaacagctcggcgaatattgcagtctttagagaagatgtcaagccctttagcggatgcaaaaagaattccatccattgtttcttctcctctgaattctcctcttgataggagtgggatagatatcacagattttcaggccaaaagagaaaaggtggattctcaatatcctcctgttcagagacttatgaccccaaagccagtttccatagcaacaaatcgaagtgtttattttaaaccatctctgactccttctggtgaattcaggaagactaatcaaagaatagataacaagtgcagtactggatatgaaaaaaatatgacacccggacaaaatagagaacaacgagaaagtggcttttcatatccaaatttcagtttgcctgcagccaatggtttatcttctggagtaggtggtggaggtggcaagatgagacgagaaagacacgcctttgttgcttctaaacctctggaggaggaggaaatggaagttccagtattaccgaaaatctctctaccgatcaccagttcttcactgcctacctttaattttagttcccctgagatcacaacttcctctccatcacccatcaattcgtctcaagcattaacaaacaaggtacaaatgacctctccgagcagcactggcagtcccatgtttaaattttcatctccaatcgtaaaatctactgaggcaaatgtactacctccatcatctattggatttacatttagtgtgcctgttgcaaaaacagcagaactttctggttctagtagtactttagaaccaattataagtagttcagctcatcatgtcactacagtgaacagtacaaattgtaagaagacaccacctgaagattgtgagggtccttttagacctgcagaaatcctgaaagaaggaagtgttctagatattctgaaaagccctggtttcgcatcgccgaagatagattctgttgctgctcagcccaccgcaacaagcccagtagtttatacaagaccagcaataagtagcttttcttctagtggaattgggtttggggagagtttaaaagctgggtcatcatggcagtgtgatacatgtctactccagaacaaagttacagacaacaaatgcatagcctgtcaagcagcaaaattgtcacccagagatactgctaaacagactggaattgaaacaccaaataaaagtggcaaaacaactctttctgcatcagggacaggctttggagacaaatttaaaccagtgataggcacttgggattgtgatacctgtttagtgcaaaataaacctgaagcaataaaatgtgtagcctgtgaaacaccgaaacctggaacttgtgtgaagcgagcccttacattgacagtggtttcggaaagtgctgagactatgactgcttcatcttccagctgcactgtaaccactggtaccttaggatttggagataaattcaaaaggcccattggatcttgggagtgttcagtatgctgtgtttctaataatgcagaagacaataagtgtgtgtcctgtatgtctgagaaaccaggaagttcagtacctgcttcaagtagcagcactgtacctgtctctctgccttctggaggctctctaggattggaaaagttcaagaaacccgagggaagctgggactgtgaattgtgcctagtgcagaataaggcagactctaccaaatgtttggcatgtgaaagtgcaaagccaggcacaaaatctgggtttaaaggctttgacacatcttcctcatcttcgaactcagcagcctcctcatccttcaaatttggtgtctcatcatcctcttctgggccttctcagactttaacaagcactggaaattttaaatttggagatcagggaggattcaaaataggtgtgtcatctgattctgggtctataaaccccatgagtgaaggctttaaattttctaaaccaataggagattttaaatttggagtttcatctgaatctaagcccgaagaagttaaaaaagatagtaagaatgataattttaagtttggactttcttctggtttaagcaacccagtttctttaactccatttcaatttggggtatctaatcttggacaggaagaaaagaaagaggaactgcccaaatcttcctctgcaggttttagctttggtacaggtgttattaactccacccctgctcctgctaacaccatagtgacctctgagaacaagagcagcttcaaccttggaaccatagaaaccaagagtgcttcagtggctcctttcacatgtaagacatcagaagctaaaaaagaagaaatgcctgccaccaaaggaggattctcttttggcaacgtggagcctgcctctctgccatctgcctcagtgtttgttttgggaaggacagaagagaaacagcaagagcctgtcacttctacttccctagtttttgggaagaaagctgacaatgaagagccaaagtgtcaaccagtgttttcctttgggaattcagagcaaaccaaagatgagaattcttcaaagtccacatttagttttagtatgacaaaaccatctgagaaggaatctgaacagccagcaaaagccacttttgcctttggagctcaaactagtactacagctgatcaaggtgcagcaaagccagtttttagtttcttgaacaacagttcctctagttcaagtacaccagccacttctgctggtggtggcatatttggtagttccacctcttcctccaatccacctgtggctacctttgtgtttggacagtccagcaatcctgtgagcagctctgcctttggtaacactgctgaatccagcacctctcagtctttgctattttctcaagatagcaaactagcaaccacatccagcacaggtacagctgtcaccccatttgtctttggtccaggagccagcagtaataatactaccacctctggtttcggctttggagccacaaccacatctagctctgcaggatcctcctttgtatttggaactggaccctcagcaccatctgccagtccagcatttggtgctaaccagaccccaacatttggacaaagtcaaggtgccagccagcccaatcccccaggctttggatctatatcatcttccacagcattatttcccactggttctcagcctgcaccacctacttttgggacagtgtcaagcagtagccagccccctgtgtttggacagcaacctagtcagtctgcatttggctctggaacaactcctaattctagttcggctttccagtttggcagcagcactacaaatttcaacttcacaaacaacagtccatcaggagtgttcacatttggtgcaaattctagcacacctgcagcctcagcccagccttcaggctcggggggctttccatttaaccagtctccagcagcatttacagtggggtcaaatgggaaaaatgtgttctcttcttctggaacttcattctctggtcgcaagataaagactgctgttagacgcaggaaataaaggtcacattggtgttgtactcaattttaacaacagctggtgccctgctttcagatactggattgtactttgtgctggggttatctgaagtcagatctgcctaaggacttctttaattttggaattttcctcctttctctttcgttacagaagccccaccctgcctcacccacccttttttaaataaataaatagctagactggtgactgattcttcagcaaaaatattttatgatccagcagattattcactgatttgacatagtctggctgtacccaggaatggagcctgcacggtgaatggctttgtatagaacctctttgtctacaccattatgtgcgctgataacgttcatggaacgcgttgaaattgtaattatatctgaggaattctgtatagattagaattctgtatagattagagagtgttgaaacggatgatttctatgctgagtttgtgctggtgtatgtgtgaagtgagtgagttgggtgtattgtgcgctaaacttttctgatagaggaagcctgattaaagaatggtccgtgctaaggacttgttagatctagttcactctccatttaataattatatgctatttctatattttcattctcctatcacctgtcttgcctttttcattattttattatgaaacttgtgtaaatacaattttgtttctgtactttttggcataacataaatctgtgaacttgaaatttgaattttgtgttagagatttttttgttgtttgtttagtcttgtctcagattttattatgtaaatcccattattcaaagttgcctaaatccatttggaaatctttaaaaaaaaaattggggattcttaaagttgaatttattggcttttctgatccagttttgtttggaccaaaaaccagtattgtacaaagtattaagcatatatttttatatttactaaaatggtctgtggtgacttttggataataaggaaaagtttaatattaaagccatgtttattacagtataattaacatgttaaaccatgggataaatgccatcaataaaaaattatgacat

SEQ ID NO: 14455 - protein, 1475 aa, Homo sapiens [sequence omitted]

SEQ ID NO: 14456 - DNA, 537 bp, Rattus norvegicus
  ref <308>: DATABASE ACCESSION NUMBER: EMBL / AA858570
  ref <309>: DATABASE ENTRY DATE: 2000-03-03
tttttttttttttttttggtgcttttctgtctttgactgtttggtcttattaccatttattacaaccttttatttacataatgcaagtacatttttccctgacaacaatttgtgaatgagaaaagtttcatttttcatttataaatcatacatacatatacaaatacattctttgcacatttttctatttgactttgttcactggatttttcataattcctaaactcttaggaaatatgaatggctttgcaatgcttcttcccctcatcttgtcttctgccaagatcacttgaaggtaagaattcttctcaacaactcccggcatgattccaattaatttctgaaaaaataaactgcaatccatctctcaaaatcagtttaaactttattttaatccattgccccaatgctttacagacatttcatagcaattacgttatcattgtaaggataggcaaatacacattccacactggccaaggacctaacttttgtcagcatttgcagactcggtgtaatgatgacaaaactcactat

SEQ ID NO: 14457 - DNA, 535 bp, Rattus norvegicus
  ref <308>: DATABASE ACCESSION NUMBER: EMBL / AA859916
  ref <309>: DATABASE ENTRY DATE: 2000-03-03
cggccgcaaaggttttttttaatctttcatgttatagatattttcatcttataagctcatgagccatgagcaggaattcgcagtcttctgtgagctaactctgcccatgtgaagataatttttcaccattcaccactgttctgttagcataaagatatacatttgtatatacagaactactaactgcgtcttcagcatcatgaagcatttatgttcgccataaagaacctcgtgtctgcacattgtacctctactttttctccctctgatctcaccagtcactaaatacgaatgtacttctgaagttgtatttgtgtagtaagttatttctttctgtagctgctatctggtttccttttatctttttaaggtatttttagagtaacttcctaccaacaactttaagtatgttgttaatagtagtaatttataaatttcaacttaagaacacaataatttctgtttcttctttatttacagagagctgttttcagatagtgacagaattcgtatctgtgacagatacagagcatga

SEQ ID NO: 14458 - DNA, 2512 bp, Rattus norvegicus
  ref <308>: DATABASE ACCESSION NUMBER: EMBL / AJ302650
  ref <309>: DATABASE ENTRY DATE: 2001-02-12
tttttaagtgttagttttgatattttcaaaaagcttttaggttgcttgtgaagtcggagcaaataccaagaaggcgttgtggcaagatggatgtgaggaaggaccaatctcatctgacgctcaaccagacccctgaagctcatgtagagaagtcccatgctccagacatcattggatcttggagtttgagaaacagagaacaactgaagaagagaaaagctgaggcacaggggaggcagacgtcacaatggcaacttggagaacagaaaaaacgcaagtatcagagaacaggaaaaggtaatcgaagaggccgaaagagacaagggaatgtggaacaaaaggcagagtcttggtcacaaacagaaaacgaaagggtacaggaggtattggtacctgctgaggaagaaactgagtactctggaaacactgcaactcaagcccttcccttgagagcatcccccacaaaagctgtgcctacagaacactgttctgaagtaccccaagaaagcttgcagtgccaagaaataactatacagaaccattctcaaacacaccaacgaagggacaaagctgaagctctctctcctaccacgtgccaagaaataggagtacttcaatattctcctaagatgtgccaagatatggctgaacctgaggcacgctcacctaaaatgtgccaggagacagctgtgccccaaacctattctcccaaagcacacgaagatatggctgaatatgaggcactttcgcctaaaatgtgccgggaaacacctgtgccacaataccattcttccaaaataccccaagatatgaccggacctgaggcgttagctcctgatatgtgccaagaaacaactgtgtcccaaaaccattcttccaaagtaccccaggatatggctggacctgaggcgctctctcttaaaatgtgccaggaaccaactgtgcttcaagaacatactttgaaaatatgccaagatgtggccagacctgacgtcctctcttctaaaacacatcaagagatgactgttcccaaagcccttccctgtataacacctggagatgctgctggcccagaaggatgctcccccaaaacactcccccagtcagatgtaacccccatgtcagtcacaccaggaaaaaatacttcccacccagatctgggaacggctgtggctgaaggctgcttttctgaagccggagaatgcattgtatctgaagacatttctacaaaaacacaccaagaagcagttgaacctaaattcctttctcacaagacttacaaagaattcactgtgcctatagtctcctctcataaaaccatccaagaatcacctgggcctgaagaatattcacctggaagccgtcatgaaatgtcagagcctgaagacctctctatcaagacctgtaagaacagggatgggcctaaacacagccttccagaaggagcccaggaagtaggtggggcccagaggcaggaccctgatgcacaggatatcgaggacgctggtgctttctctcaagacctggaggaatgaaacaaagcagatcaagacccagaaactccagcgggtccacagggtcctcaaaagatctttccagaaaatgatgtccacagctctgctctattttaacagtgctcggtgatgaagttgcagaccaactccgtacagcataagtgtctcttgtgattttactgaaacaccgcagcgatcactaaaatttgcattgctattttaactcatgttttttcatttgtagatcttatctgaaggagagaactaacatttttaaggctctaacacatagacaataacgtgtgtgtgtgtgtgtgtgtgtgtgtgtgtgtttgtgcctgtgtgagcgcctgacagtgtgtatttgtatatgggggaagacagtaagagcggggaaaggctgagtaattgattttcccctctgagaagaaacatatatttagtgattctgaggaaaagatagcaatttaatatgaacacttagcattttgaaagtatatagtttcttgtgaattttgtcaattagtgaggttgtagcaacatcagaattttactcaaactttacatgtctctttgagttaatcagaacaattcttattctaaaaattcttgcaagttttttttttgaattgataaatgccatttatttctgtgtgaacctggactttttatttctattttttaaactgttacttgtaaaaaaaaatgtacatcgtcatttctatggctttagctgtgttaccaagacagcatcttggtttatgctggggttgtaaaacgcctaaatggctcagtgcctttgctcactaggttaatctgatcacatggaggaacacagcagaaaaaaattattccaaaagaaaagtgccgagtgcaacaggctcctctctgagcagcctacgccctagctcttcagtggtttcctttctgtggctctttctcttaaacctcatgcttaaaatccatgttaaagtattattaataaactcccccaaacc

SEQ ID NO: 14459 - protein, 482 aa, Rattus norvegicus
  ref <308>: DATABASE ACCESSION NUMBER: SWISS-Prot / CAC16090
  ref <309>: DATABASE ENTRY DATE: 2001-12-01
MDVRKDQSHLTLNQTPEAHVEKSHAPDIIGSWSLRNREQLKKRKAEAQGRQTSQWQLGEQKKRKYQRTGKGNRRGRKRQGNVEQKAESWSQTENERVQEVLVPAEEETEYSGNTATQALPLRASPTKAVPTEHCSEVPQESLQCQEITIQNHSQTHQRRDKAEALSPTTCQEIGVLQYSPKMCQDMAEPEARSPKMCQETAVPQTYSPKAHEDMAEYEALSPKMCRETPVPQYHSSKIPQDMTGPEALAPDMCQETTVSQNHSSKVPQDMAGPEALSLKMCQEPTVLQEHTLKICQDVARPDVLSSKTHQEMTVPKALPCITPGDAAGPEGCSPKTLPQSDVTPMSVTPGKNTSHPDLGTAVAEGCFSEAGECIVSEDISTKTHQEAVEPKFLSHKTYKEFTVPIVSSHKTIQESPGPEEYSPGSRHEMSEPEDLSIKTCKNRDGPKHSLPEGAQEVGGAQRQDPDAQDIEDAGAFSQDLEE

SEQ ID NO: 14460 - DNA, 163 bp, Rattus norvegicus
  ref <308>: DATABASE ACCESSION NUMBER: EMBL / AA866221
  ref <309>: DATABASE ENTRY DATE: 2000-03-03
tttgtttttttttttttccattttcttttaaaaacttccatcacacatgggtgtcttttaatgggaaatcaacatcgcatttaaaatacctggacaagctggcgtgagacaactgggaactcttcagtacccatcgatgacatggagggatggagggagggat

SEQ ID NO: 14461 - DNA, 355 bp, Rattus norvegicus
  ref <308>: DATABASE ACCESSION NUMBER: EMBL / AA866290
  ref <309>: DATABASE ENTRY DATE: 2000-03-03
ttttttttttttttaactgcaaatttttatttaagaagccacacaatgattcattagagagtttctggtcaaacattccatttcacagagtaattcaatacaagttgagtttaagtgatgcaaacaggaccatgtctgggaacaatccaaaacgtacttaaaagatcccctttggagtgtgtggcattattctgtatcttacagagactgtctcagatgaatggagtggatttcatatgtatctttgcatgtgtgtgcatgcgtgtacttgtttttttgtgggtgtgtaaatgtgtttgtatctgtgggacagggagggagggaggaatgggaaggagggagaggagagggaaac

SEQ ID NO: 14462 - DNA, 521 bp, Rattus norvegicus
  ref <308>: DATABASE ACCESSION NUMBER: EMBL / AA866472
  ref <309>: DATABASE ENTRY DATE: 2000-03-03
cggccgccaaggtttttttttattttttagcgccatctgctcgcggcgccgcctcccgctcctcccgccgccgccgccgccgccgccgccgccgccgcactgagtcactgcctgcgcagctccggccgctcggctccgcgtccgagcctcctggaacgatatttggagttcttaaaagatggcagacattgacaacaaagaacagtctgaacttgatcaagatttggaagatgttgaagaagtagaagaagaagaaacgggtgaagaaacaaaaatcaaagcacgtcagctaactgttcagatgatgcaaaatcctcagattcttgcagctcttcaggaaagacttgatggtctggtagacacaccaacaggatacattgaaagcttgcctaaggtagtcaaaagacgggtgaatgctctcaagaatcttcaagttaaatgtgcacagatagaagccaaattctatgaggaagttcatgaccttgagagaaagtatgctgttctctatcagcctctgtttg

SEQ ID NO: 14463 - DNA, 1560 bp, Homo sapiens
  ref <308>: DATABASE ACCESSION NUMBER: EMBL / M86667
  ref <309>: DATABASE ENTRY DATE: 1999-07-01
ccctgagtcactgcctgcgcacgtccggccgcctggctccccatactagtcgccgatatttggagttcttacaacatggcagacattgacaacaaagaacagtctgaacttgatcaagatttggatgatgttgaagaagtagaagaagaggaaactggtgaagaaacaaaactcaaagcacgtcagctaactgttcagatgatgcaaaatcctcagattcttgcagcccttcaagaaagacttgatggtctggtagaaacaccaacaggatacattgaaagcctgcctagggtagttaaaagacgagtgaatgctctcaaaaacctgcaagttaaatgtgcacagatagaagccaaattctatgaggaagttcatgatcttgaaaggaagtatgctgttctctatcagcctctatttgataagcgatttgaaattattaatgcaatttatgaacctacggaagaagaatgtgaatggaaaccagatgaagaagatgagatttcggaggaattgaaagaaaaggccaagattgaagatgagaaaaaggatgaagaaaaagaagaccccaaaggaattcctgaattttggttaactgtttttaagaatgttgacttgctcagtgatatggttcaggaacacgatgaacctattctgaagcacttgaaagatattaaagtgaagttctcagatgctggccagcctatgagttttgtcttagaatttcactttgaacccaatgaatattttacaaatgaagtgctgacaaagacatacaggatgaggtcagaaccagatgattctgatcccttttcttttgatggaccagaaattatgggttgtacagggtgccagatagattggaaaaaaggaaagaatgtcactttgaaaactattaagaagaagcagaaacacaagggacgtgggacagttcgtactgtgactaaaacagtttccaatgactctttctttaacttttttgcccctcctgaagttcctgagagtggagatctggatgatgatgctgaagctatccttgctgcagacttcgaaattggtcactttttacgtgagcgtataatcccaagatcagtgttatattttactggagaagctattgaagatgatgatgatgattatgatgaagaaggtgaagaagcggatgaggaaggggaagaagaaggagatgaggaaaatgatccagactatgacccaaagaaggatcaaaacccagcagagtgcaagcagcagtgaagcaggatgtatgtggccttgaggataacctgcactggtctaccttctgcttccctggaaaggatgaatttacatcatttgacaagcctattttcaagttatttgttgtttgtttgcttgtttttgtttttgcagctaaaataaaaatttcaaatacaattttagttcttacaagataatgtcttaattttgtaccaattcaggtagaagtagaggcctaccttgaattaagggttatactcagtttttaacacattgttgaagaaaaggtaccagctttggaacgagatgctatactaataagcaagt

SEQ ID NO: 14464 - protein, 392 aa, Homo sapiens
  misc_feature (1)..(392): Xaa=Unknown amino acid
MADIDNKEQSELDQDLDDVEEVEEEETGEETKLKARQLTVQMMQNPQILAALQERLDGLVETPTGYIESLPRVVKRRVNALKNLQVKCAQIEAKFYEEVHDLERKYAVLYQPLFDKRFEIINAIYEPTEEECEWKPDEEDEISEELKEKAKIEDEKKDEEKEDPKGIPEFWLTVFKNVDLLSDMVQEHDEPILKHLKDIKVKFSDAGQPMSFVLEFHFEPNEYFTNEVLTKTYRMRSEPDDSDPFSFDGPEIMGCTGCQIDWKKGKNVTLKTIKKKQKHKGRGTVRTVTKTVSNDSFFNFFAPPEVPESGDLDDDAEAILAADFEIGHFLRERIIPRSVLYFTGEAIEDDDDDYDEEGEEADEEGEEEGDEENDPDYDPKKDQNPAECKQQX

SEQ ID NO: 14465 - DNA, 413 bp, Rattus norvegicus
  ref <308>: DATABASE ACCESSION NUMBER: EMBL / AA874830
  ref <309>: DATABASE ENTRY DATE: 2000-03-03
tttttttttttttttttgcgaaaacttttgctttaatttttaacgaaaaacaggtaaccagaggactcgggctctgacatgccgtggacagcaaggtgaggagctaggtacaaagggtagcagcctgcagagttggtggggcttggccttggccctatcttcccatgcctcagcagaaggatatggggacacttctgtacagcctccaggaggggcatagacaacgacagcccaggtgggtgctcatgggactcttaacacaggtggcgaaatttgggtttttatcttcgggccggccatatttcctcatgcactcttgatatcttggatagaaatagtccgtctcggggtcgttctcgaacacctctctagcctcctccttgctgcacacctcctccacgcactcccgttcc

SEQ ID NO: 14466 - DNA, 2461 bp, Homo sapiens
  ref <308>: DATABASE ACCESSION NUMBER: EMBL / L13720
  ref <309>: DATABASE ENTRY DATE: 1999-07-02
ccgcagccgccgccgccgccgccgccgcgatgtgaccttcagggccgccaggacgggatgaccggagcctccgccccgcggcgcccgctcgcctcggcctcccgggcgctctgaccgcgcgtccccggcccgccatggccccttcgctctcgcccgggcccgccgccctgcgccgcgcgccgcagctgctgctgctgctgctggccgcggagtgcgcgcttgccgcgctgttgccggcgcgcgaggccacgcagttcctgcggcccaggcagcgccgcgcctttcaggtcttcgaggaggccaagcagggccacctggagagggagtgcgtggaggagctgtgcagccgcgaggaggcgcgggaggtgttcgagaacgaccccgagacggattatttttacccaagatacttagactgcatcaacaagtatgggtctccgtacaccaaaaactcaggcttcgccacctgcgtgcaaaacctgcctgaccagtgcacgcccaacccctgcgataggaaggggacccaagcctgccaggacctcatgggcaacttcttctgcctgtgtaaagctggctgggggggccggctctgcgacaaagatgtcaacgaatgcagccaggagaacgggggctgcctccagatctgccacaacaagccgggtagcttccactgttcctgccacagcggcttcgagctctcctctgatggcaggacctgccaagacatagacgagtgcgcagactcggaggcctgcggggaggcgcgctgcaagaacctgcccggctcctactcctgcctctgtgacgagggctttgcgtacagctcccaggagaaggcttgccgagatgtggacgagtgtctgcagggccgctgtgagcaggtctgcgtgaactccccagggagctacacctgccactgtgacgggcgtgggggcctcaagctgtcccaggacatggacacctgtgaggacatcttgccgtgcgtgcccttcagcgtggccaagagtgtgaagtccttgtacctgggccggatgttcagtgggacccccgtgatccgactgcgcttcaagaggctgcagcccaccaggctggtagctgagtttgacttccggacctttgaccccgagggcatcctcctctttgccggaggccaccaggacagcacctggatcgtgctggccctgagagccggccggctggagctgcagctgcgctacaacggtgtcggccgtgtcaccagcagcggcccggtcatcaaccatggcatgtggcagacaatctctgttgaggagctggcgcggaatctggtcatcaaggtcaacagggatgctgtcatgaaaatcgcggtggccggggacttgttccaaccggagcgaggactgtatcatctgaacctgaccgtgggaggtattcccttccatgagaaggacctcgtgcagcctataaaccctcgtctggatggctgcatgaggagctggaactggctgaacggagaagacaccaccatccaggaaacggtgaaagtgaacacgaggatgcagtgcttctcggtgacggagagaggctctttctaccccgggagcggcttcgccttctacagcctggactacatgcggacccctctggacgtcgggactgaatcaacctgggaagtagaagtcgtggctcacatccgcccagccgcagacacaggcgtgctgtttgcgctctgggcccccgacctccgtgccgtgcctctctctgtggcactggtagactatcactccacgaagaaactcaagaagcagctggtggtcctggccgtggagcatacggccttggccctaatggagatcaaggtctgcgacggccaagagcacgtggtcaccgtctcgctgagggacggtgaggccaccctggaggtggacggcaccaggggccagagcgaggtgagcgccgcgcagctgcaggagaggctggccgtgctcgagaggcacctgcggagccccgtgctcacctttgctggcggcctgccagatgtgccggtgacttcagcgccagtcaccgcgttctaccgcggctgcatgacactggaggtcaaccggaggctgctggacctggacgaggcggcgtacaagcacagcgacatcacggcccactcctgcccccccgtggagcccgccgcagcctaggcccccacgggacgcggcaggcttctcagtctctgtccgagacagccgggaggagcctgggggctcctcaccacgtggggccatgctgagagctgggctttcctctgtgaccatcccggcctgtaacatatctgtaaatagtgagatggacttggggcctctgacgccgcgcactcagccgtgggcccgggcgcggggaggccggcgcagcgcagagcgggctcgaagaaaataattctctattatttttattaccaagcgcttctttctgactctaaaatatggaaaat

SEQ ID NO: 14467 - protein, 679 aa, Homo sapiens
  misc_feature (1)..(679): Xaa=Unknown amino acid
MAPSLSPGPAALRRAPQLLLLLLAAECALAALLPAREATQFLRPRQRRAFQVFEEAKQGHLERECVEELCSREEAREVFENDPETDYFYPRYLDCINKYGSPYTKNSGFATCVQNLPDQCTPNPCDRKGTQACQDLMGNFFCLCKAGWGGRLCDKDVNECSQENGGCLQICHNKPGSFHCSCHSGFELSSDGRTCQDIDECADSEACGEARCKNLPGSYSCLCDEGFAYSSQEKACRDVDECLQGRCEQVCVNSPGSYTCHCDGRGGLKLSQDMDTCEDILPCVPFSVAKSVKSLYLGRMFSGTPVIRLRFKRLQPTRLVAEFDFRTFDPEGILLFAGGHQDSTWIVLALRAGRLELQLRYNGVGRVTSSGPVINHGMWQTISVEELARNLVIKVNRDAVMKIAVAGDLFQPERGLYHLNLTVGGIPFHEKDLVQPINPRLDGCMRSWNWLNGEDTTIQETVKVNTRMQCFSVTERGSFYPGSGFAFYSLDYMRTPLDVGTESTWEVEVVAHIRPAADTGVLFALWAPDLRAVPLSVALVDYHSTKKLKKQLVVLAVEHTALALMEIKVCDGQEHVVTVSLRDGEATLEVDGTRGQSEVSAAQLQERLAVLERHLRSPVLTFAGGLPDVPVTSAPVTAFYRGCMTLEVNRRLLDLDEAAYKHSDITAHSCPPVEPAAAX

SEQ ID NO: 14468 - DNA, 471 bp, Rattus norvegicus
  ref <308>: DATABASE ACCESSION NUMBER: EMBL / AA874857
  ref <309>: DATABASE ENTRY DATE: 2000-03-03
tttttttttttttttttccttgaaaaccccaacttttattcttgaaagacagctggataaactggcaaatgccagtttgttgaaatttcaagatggtataaaaatgcttccaggatagagtcagcattcgtgttcacttcagttccattcacagatggattcagcttccaccgggtgcaatgcttgaatcattcatccaccatttgccaactttgattgtgaggtactgaatatgatggatcaagttcttaaaaatttattttaaaagaataaatgatgctggaattctggacctgaggatcgatcgtcagtattcagtaaatccagagatgaaactgaaggtgaactgagacttcagttctggttatttccaacttctctgcgaggatgtgtatctcattaaagctcagttgtggccacagttcctttttgcagatagtcaagttttaaggtttaaaatgcagccagcca

SEQ ID NO: 14469 - DNA, 31737 bp, Homo sapiens
  ref <308>: DATABASE ACCESSION NUMBER: EMBL / AC004854
  ref <309>: DATABASE ENTRY DATE: 2002-06-05
gatcataactgcttctgtcaaaccatgataccgagctttatgacaactcagaagtaaggactaagagaaggcaaatataatgccttcaagatcaagagacgtttatgtagttcaactgttagaaacagctcaacattgagctagtgagtagagtgtgtatgtcagtatccacaatatacaaacccttcacggagctgcaagaccttttaactgtccttcaggtgcttccaaatgctggtcctgtggaacttctttctttctgaggctggttttctttcaacacagtttggggtctgacaatcatgtgttcagatttccaggaaacgtgactaccttcctgttgagtccttgtttctcctacgcatcttaaaatgacactttctgccaataaagctttccttgtttctacaaataacttctcttcatctgtttctttaagtttctgcagctcaatatacttcacaaagcattgacaggtaggcttgaagcttggattgaacagatcaaaagcttttgaccagatttgtaggctgaatagaattttgctccaatgggctgggcgcgatggcttatgcctgtaatcccagctctttgggaggccagggcaggtggatcaccggaggtcaggagttcgagaccagcctggccaacatgacaaaaccccgtctctacttaaaatacaaaaattagctgggtgtggtggcgtaagtagctggtgtaatcccagctactcgggaggctgaggcaggagaatcacttgaaatcaggaggcgaaggttgcagtgagccgagatcatgccattgtactccagcctgggcaaaaagagcaaaacttcatctaaaaaaaaaaaaaagaattttgctccaatgggatcctcatgataccagatgtcctccatgagaattttggctttgccatatcataagtggggcctctggaagactggctccttccacaggggaaaggtgttatgtatgtgatgctagagaggtttctccttcaatttctcctacagcactcctgctcaaatcacatactgagtctgcaaaaagatgctccctgcgatttccagccagctgtagatgttcctcttgagtgcttcctgagtggtcctcaagggtgctcctcctagattctccagatgctccccaggatacgcctcccataaaagacatctaggtgattttccactccgtgaattcttaggacactttcttaactgcttctggtttctctgttttctacttaactttgcatattcctgttagatcaatctttctaaagtgcagctctgaaagggggtatggtggggggatacttctgtgcaaatgcctgaaatacctccagtggcatctccatcagaataaaacccagacatctgcatagaacatgtaatgatcaagtcagagtatttaggatatccattgccctaagcatttatcatttctatgtgttggaaacatttcaagttctctcttctacctacgttgaaataaacaaaacattgttgttaactatagccaccttactgtgactagatctttttccttctaactgtatgttcgtacccattaaccaacgtgttcttcccccctcccactgacacccctttcccagtctctactatctatcattctactctctacttctatgggatccactttttttttttgagatggagtttcactcttgttgcccaggctggagtgcagtggtgcaatctcagctcaccacaacttctgcctcccaggttcaagcgattctccttcctcagcctcctgagtagctgggattacaggcatgtaccaccacgcccagctaatttttgtatttttagtagaaacagggtctcaccatgttggccaggttggtctcaaactcctgacctcaagtggtctgcccacctcggcctctcaaagtgctgaaattataggcgtgagccaccacgcccagtcaatttttttttctttttttggagacagtctcactctgtagcccaggctgcagtgcagtggtgcgatcttggctcactgcaacctccgcctaccaggttccagtgattctcctgcctcagcctcccaagtagctgggattacaggcacacaccaccacgcccagctaatttttgtatttttagtaaaaacagggcttcaccatatggccaggttggtctcaaactcctgacctcaagtgatccgtccacctcgggccccccaagtgctgggattacaggtgtgagccactgtgcttggcctgagatcaacttttctagctcccacatatgagtaagaacatgtgatatgttcaataatgagaggatgaaaaaaaggacatgtgatatatgtctttccatgcctagcatatttcacttaacataatgatctccatttccatccatgttgctgcaaaggacaggatttcattcttttttatggctgaatagtattccattctatacatgtaacaaaatatcacatgtaccccataaatatgtacaaatatgtattgattaaacaaaagaaatgtatccaataaagaatgaagatgctagtaaccagaatttggcatatcctgtgttttagaaaccagtgcttaccagatttctggaagataaataatcagctagttattctgtatgtgatggtctatgtggattgaaccctttccttactatttttactggtattttgtaaatatgaagccattgaagaataaacaaattctatgttgtcccaaaggaaaatacaactaattacgtatcagtgactaattaaatacggtcatttttttcttctgaaacacttcaatatagtttaaaaataaaatagtttacataactttaaaaaaaatccagacatttggaagtagcctgtccctctgaaccctcagaatgtttgtgaacttgtctctggccaggtacagtggcttgtgcctataatcccggcacttggggaggctgaggcaggaggatcacttgaggccaggagttagagataggcctgatcaacatagccagaccctgtctctacagaaaaaaaaattttttttttaattagctgggcatggtggcctgtgcctatagttccagctacttgggaggctgaggcaggacgattgcttgaggcaaggagtgcaaggctgcagtgagctatgattgtgctgctgcactccagcctaggtgacagggcaagagcccatctcaaaaataataataataataatgataaataaataactaaaattagctgggtgtggtggcatattcctgtagtctcagctacttgggaggctgaggtgggaggatctcttgagcctaggagtttgaggctgcagtaagctgtgatggtgccaccgcacttcagcctgggcaacacagtgagaccctatctctaaaaaaaaaaaaggtagcagggatacttttttcttatctcctactaaatgcctatttacctttccagaatgccacacttggcttataaacactaatgacctaacagaatgccttactcagtgggaggccaaataaataactctcatgttgttctctttcttcatgtgacccagtctgagtatttgaacctaagggtagaacttacccaacaccatacttagaaatgacttcaggtcaggcatggtggctcacgcctgtaatcccagcactttgggaggccgaggcgggccgatcacgaggtcaggagatccagaccatcctggctaacacggtgaaaccccgtctctactaaaaatacaaaaaattagctgggcatggtggcgtgcccctgtagtcccagctactcgggaggctgaggcagcagaatggtgtgaacccgggaggcagaggttgcagtgagccaagatcacgccactgcactccagcctgggtgacagagcaagactaggtctcaaaaaaaaaaaaaaaaaaaaaaaaaaaaaaaagccaggcactgtggctcacacctgtaatcccagcactttgggaggccgaggcgggcagatcacaaggtcaggagattgagaccatcctggctaacacggtgaaacctcgtctctactaaaaatacaaaaaattagacgcacgtggtggtgggtgcctgtagtcccagctacttggtaggttgaggcaggagaatcacttcaactcgggaggccgaggctgcagtgagccgagatcgtgccactgcactccagcctgggtgacagagtgagactctgaggtctcaaaaaaaaaaaaaaaaaagaggccgggcgcagtggctcacgcctgtaatcccagcactttgggaggccgaggcgggcggatcacaaggtcaggagatcgagaccatcctggctaacacggtgaaaccccgtctctactaaaaatacaaaaaaattagccgggcgtggtggcgggcgcctgtagtcccagctactcgggaggctgaggcaggagaatggcgtgaacccgggaggtggagcttgcggtgagccgggatcgcgccactgcactccagcctgggcgattgagcgagactccgtctcaaaaaaaaaaaaaaaagaaatgacttcagacatttacaatgcactttcacacacaccccttatttcatatcacaactaaccttcaaggtaggtgttcataccgtcacgtctcaactgaggaaacgtaggctcagagatgtgtagggatggggctccggttctttctgtccaatttcgtaccgcccaacacttaggtcctgagaccctgggggcccctgagatctcccgtcaggagggactgttcttattcagatattgcttagccactacatgagtgaattacatttttccaatgaagtctctaagactatatgtattaactattgccaaagtaaaagaagcactaaaattcctaatatgaatataggtaattagcaaatttttttttttttttgagacggagtctcaggtgcctgcaaccacacctggctaattttttgtgtttttagtagagacatggtttcaccgtgttagccaggatggtctctatctcctgaccttgtgaaccacccacctcagcctcccaaagtgctaggattacaggtgtgagccaccgcgcctggccagcaaataatttttataatttttcaaaagatctattatattaatcattgaggtgtttatattgtttgatatctaaaaagtcaagccagtcttatagatttacccaaatccatttactggtacagattcccatttggaacagtatgtggttgtgacagccacaggcagcgctgagcctgtgggggcagaattgggggactggagaagatgcagacttcaccatcacacaaggctgcttttctatgattccaggaaaaagaaagactacttgtctaaaccacataactgtccataaaagcctgagctctctgttagttctcccaaaccaaatcactatggcaacacaagctacgcacacttatgcatgcttacgcacacatacgagcacacttcctgggacagccccaaatgggcgctcgcgtgtctgggctgaaatgtgggccagaacccacttcaatagcacagagatcaccagaagcagcatttctaagcagaaatgttttcactcagccttaaaccgataagctttcaaaatgtggagtattaattcactctactatttttattttattttgttttattttattttattttattttattttacttttgaaacagagtctcactgtcacccaggctggaagcacagtggcaaaatcttggctcactataacctccacttcccgggttcaagcaattctcctgtctcagcctccccagtagctgggacttcgggcacatgccaccaggcccagctagtttttatatttttagtagagacagggtttcaccatattggtcaggctggtctcgaactcctgacctcaggtgatccacccacctcagcctcccaaagtgctgggattacaggtgtgagccaccatgcccagcccactctactatttttatcaaataattagaaatggtacctgggaagatgagtgggcaaaatatgggatgttcagataccatggtttgaagacattacaattagagatgtaaacctgacatgaaagtaaaaggaaattagaattatgttttattttctgtccttttaaaatatagaaatcatgcatgctcactggaagaaaccgaaggcatggaaagaaagaggcccttttgtggcctccagtctggggcagcctagtgtgtggctaaggaatatgtggaaatggaggcgactctgcccctttgcagcaggccatcaaaagccagccggcaagtgagtgagatgtcagatggctccagcctcagtcttgagccatcccctctgagccttgccaaactgcagatttgtgagcaaaatcaatgtgatgttgcttttagccaccaagttttcaggcagatcaggggtcctggagtaggtgtcattgaaactgggctctgaaggcacccaaagagggagggagggaaagggtttgaggagaccatgggtgaaggcctggggcaggtgcacaaccaggggtgggaagaggcaactccaggtgagaaggcagagctagggcaggagtgtgtggaggctggagggccaggagaagaggccaaaccatctccctcagggctccaggccaaaccatctccctcagggcttgggagccatgccagagggcctggcatagttgaaatgctcatctaaaggccaggtgcagtggctcatgcctgtaatcccagcactttgggaggctgaggaggatggatcacctgaggtcaggagttcgagagcagcctggccaacatggcgaaaccccgtctctactaaaagtaaaaataaaaattagctgggtgcggtggcacactctgtaatcccagctactcgggagactgaggcaggagaatcgcttgaactcaggaggcagaggttgcagtgagccaagatcgcaccactgcactccagcctgggtgacaagagagaaactccgtctcaaaagaaaacaaaaaagaaaagaaaagcaaagctcatctatacagtcactgtttggacctcagagtgcacttggccagagaagcaatattttgaatacaaactgagttaccacgctacctacagctcagttagatggctggacacagcgactacgggattccatcagtcaccctactctcacagcctgtctacctccgtcctatacaggttttactgacccagaatccaacaaagagtaggtgctcaataactgtggatgatttttgagtggttctaaatctgagcactcccatactgtctgaacaaatgacagcttgtgtctgtgtcccaaagtgtgccatcaggagcaggctctctaatggaccatgcgtgtgaagcagcctgtgtgtgaagcaggtttgtaaagagagccacgtggtgagcttggtggtggccagaagtcagtgaccagccaggaggaaaggagcttcaggtagacagctgatctgaaggcgggggctgggcctgggggttgggggtgggagggcaggtaggaaagaggcctggacagatccaggacctgcctcacctcggcctggccattctgcccttagaaacattcctatctcagggcccatttcctgctttccttcctgaaagcctatgcaggtcctcctcatgccagggcctatgtcccccgaggctgaagggagggcagcagggtgcctggtgcttcctggtgcctctatttgctgaatctggccaagccacatggaagaacacacagctggtgaggagcagagactgcagcttctggaaatgggatgggagtcggccctttcctaatatcccacactgtccagagctgagaaagtagatgcaagggtcgggaagatggcagagaaagctgaccttaagcacagaaccccgccttgtagttctgtacttcatcagcaccaggaatgtgatgagcccctgggctctcaattttgttttgcaattgagattttttttttaattaaaagaaatgatgttcttatgcctccttttaaacagtttctcagatatggctcagcccacaatgcacttggagaggtgttgacccgtcctgagcagagttgaaactgccctccctggggtgggcagtgagcctgagagccccagctgttagaaaccctggctcttctctctcactctgcccccagggacaaatcatgccatctctctgggtgtcagtctctccctatagttctggagagctgagttggcatacctctgagaccagcaaagtcatcataaaaagttcccattattgggaatgaagcaatttcccaggtccgtgggaagactatggaattgggtcacaagtcacagatggaaaggcatgggccacagtgggggactgggtcccttcttggcaagaacccaccgggacacagtccctgcctgtcattctgccttgctggctgcaggcccaggaccaccggccagaagccatgagagatcagggcaggacacgggcagcttcaacggtcaccccagactgagacaccacacgggcccgggcctcagccccactctgccctgctgcagaggccatctgcctcctggccttgtgacttcctgctgggactgagcccagcactagccctggctgtatgggctgcagcctggatccccattcaccctgactgctgacccctgacccctgaacctccttgggttcctgccaacgtctttcttccaaggccaggcctgaagtttggcaatcaagacgcatggatttctaggatctagaagtttggtcagccaaatcattaccatctaaatgaccccccagggtccccgtaatacattttaaactttttaattgaagtataacagatatatatcctaagtattcagtcggtgacttatgcaaagtgagcactaggtcctttcatgtgctgtaggccatttgtatgtcttctccagagaaatgctttgtcaggtcctttgccatttttgaattgggttatgtgggttttttattgttgagtttttgttctttttttttttttttttttttgagacagagtcttgctctgtcacccagactggagtgcagtggcaccatctctgctcaccgcaagctccacctcctgggttcatgccattctcctgcctcagcctcccgagtagctgggactacaggtgcccgccaccatgcccagctaattttttgtatttttagtagagacggggtttcatcgtgttagccaggatggtctcaatctcctgacctcgtgatctgcccgcctcagcctcccaaagtgctgggattacaggcgtgagccagcgcgcccgccgctttttttctttttttttagtgacagtatcttgctctgtcacctaggctggagtgcagtggcgcaattatagctcactgtagcctccaacttctgagctcaagcaatcctcctatctcagcctctcaagtagctataactacaggcgtgtgccaccatgcctggctaatttctttctttcttttctttctttctttctttctttctttctttctttctttctttctttctttctttctttctttctctctctctctctctctctctctctttctttctttctttctttctttctttctttctttctttctttctttctgagacggagtttcactcttgttgcccaggctggagtgcaatggtgcaatcttggttcaccacaacctctgcctcccaggttcaagcgattctcctgcctcagcctcccaagtagctggggttacaggcgcccaccaccatgcctggctaattttttatatttttagtagagatgggatttcactgtgttggccaggctggtctcgaacgcctgacctcatgatctacctgcctcggcctcccaaagtgctgggattacaggcgtgagccaccatacccacccacctaatttctactttttatttttatttattcatttatttatttttgagacaaagtctcactgtgtcacccaggctggagtgctcactgcaacctccacctcccgggttcaagtgattctcgggcctagcctcccaagaccaggaggtgtgcaccaccatgcctggctaatgtttgtatttttagtagaaacgaggtttccccatgttgaccaggctggtctgaaactcatctgcccacttgtcctcccaaagtgctgagattacaggtggaagccaccgtgcctggccttatttttatttttatcttttgtagaaacagggtttcactatgttgctcagcctggtcttgaactcctggcctcaggtgatccatggtggcacaagccactatgcccaacctcagctttaattctttatatgatagcctgcatattaatcccatatcagatgtatgctttgcaattattttgtcccattctgtggtcttccttttttcttgtgttgcccagtctggactcatcctcctgaactgctctgcgggccccacccacaatgacagagcctgaggccaggcctttctgagcctccttctcttgagctgctgtcaacctggtttctccaatcttgtctttcatacaggatttctttattagtagtatttgcacagtagttaaattgggaaacataggaattttaaggaaaaggaaaaaggcacccacaattctaccatgcctacgaataaaatcattttctgtgctgcctttgaatctttgtctatgttcatagattaattttaataaacattgtgggggtgcagctgaaccactgaagttctctgcctcgcacagagatctttgccagggtctcttgtggatttgttttgttttgctttgttttttgaggcaaggtctcactttgtcacccaggctgaagtgcagtgacgcaatcacagctcactgcagcctcaaatgtctaggctcaagtgatctccctacctcagcctcatgagtagctgagaccataagcacgcaccacatactcagcctcttcttcttcttttttttttaaattttcgtagaatcggggtttctccaccatggccaggctgatattaaactactgagctcaagcgatcctcctgcctcagcctcccaaagtgctgggattacaggtgtgagccatctcacatctcacccagcctcctgtgtttttttcaaatcttgattcattttctctcttattagccgttccggctggctttagtttgtctgcacattttatttatttatttacttatttttatgctgaggtttttgggagttttcagggggacagggtttcactctgttgtccaagctgaagtggcaatgttgtagtgttgccatcattgcttactgtaacatcaaactcctgggctctagcaaacctcccgcttcagcctcccaagtagttgagactataggtgcacactaccactcctggacaattttttattttttgtagagatatggtctcaccatattgtccaggctggtcttgaactcctagcctcaagcaatcctcctgccttggcctctcaacgcgtttgtataacaagtgcaagccagccgggtgcggtggctcatacctgtaatcccaacactttggaaggctgaggcaagtggatcacctgaggtcatgagttcgagaccagctggaccaacatggagaaaccccgtatctactaaaaatacaaaaattagccgggcgtggtgacacatgcctataatcccagctacttggttgggaggctgaggcaggagaattgcttgaacccgggaggcggaggttgcagtgaacagagatgtcgccactgcactctagtgcagtggacaagagggaaagtgggtgacaagagggaaactctctctcaaaaaaaaaaaaaaaaaaaaaaaaaaaaaggaagaagccactgtgctcagcacacatactgagtattttattgtatgctactgcctgtatatgtaaaacaattacccttgtgaaattgaaattcatgaaaattcagagaggtagatggtaaggactgacaaaagtagaagttatgtattatggcacatgtgttacagggatacgcttttatatagtaggcttgaaatttagctctcttttgaatattcaatggttcatgagaagcggtttgggaacacactttctggggtctgaggtatttgtacctgaagaaactccaggaagcagagggtcacgttgagcattctgcagacaattgttttaagactgcagctgcctgggaagcttttacacagtggagaccatcctctagccagagcatttcagccactttcttcatagatacgatgctggaggaaccagacagggagcaaacaagagctgggtcaatctgtggatctgcacactttataatcgtgttttattcaagtcttaactagagatgctaagtgggacttagtgaggataggcctgcaccctgcagcaagaccaccacagtgcggcacagatgctgggcccaggtcacacaggaggcaattcaaactcaacctggagagaataagagaagtcagacagggagccaggacggcaggaaaggatgccccatggcacagcgtgtgcagggacatgggagagcgaatatgggttgagcatccctaacccaaaaatccaaaatcggaaatgctcccaaatctgaagttttggggttggttggttggtttgtttttgagacagagtttcactcctgtcgcccaggctggagtgcaatggcatgatctcagctcactgcaacctccacctcctgggttcaagagattctccagcccagcctcccgagtagctgggattacaggcacacaccaccacacccagctaatttttatatttttagtagagatggggtttcgccatgttggccaggctggtctcaaactcctgacctcaggtgatccacccacttcagccacccaaagtgctgggattacaggtgtgagccacccaccccggccaaatctgaagctttgtgagcaatgacatgatgtcacacatgggtggctgagatgatggttcaatgtatacaaactttgtttcaggcacaaaattgtgaaaaatactgtataaaattatcctccggatatgtgtataaggtatacatgaaacaaatgaatttgatgtttagacctgagtctcattcccaagacatctcattatgtatatgcaaatattccaaaatccacaaaaatctgaaatccaaaacactgctggtcctaagcatttcaaataagggatattcaacctgtagtcccgattcttcttcccgcatgtatttctattttctcctcacgttttcccatatagttattcgttgctgatctcttaacatctacatttggagggaagtgatcaaactatagttgtggggccgggggattctacagtcgtgggaaagcagattcagcgatcaacaacgttcgccagaggatgtggacgaaaccactgtggaaaggccaacttccaacgcctctgacctggtggtcagccctgcagatttactgagtgaaaacagctgcccatatgagtattacttataacaaacaaaaacctggaaacaacctaaatcttcaaccacagagcatgcaaatatattacatcagctcatttaaattggtaatcactaagacaacattaaacatggcaccatgttttctcaataatgtaaagcaggaggaaaaacagaaaacaattttgtttcattatactatatgcagctacatactataattacaatgtaaaaacagatgtacatgttagtagaaagtagaaggaaaccagaaaaaacaaaaatgaagacaacaggtgcactaggatggtaagattgtgtatgaaattttgttcacttaaaattgtctggctaggtgcagtggctcacgcctgtgatcccagcattttgggaggccaaggcaggcagatcatttcaggtcatgagttcgagaccagcctggccaaaatggtgaaaccccgtctctactaaaaatacaaaaattagccaggcatggtggtgggtgcctgtatttccagctacttaggaggctaaggcaggagaattgcttgaacccaggaggtggaggttgcagtgagccgagattgagccactgcactccagcctgggcaacaagagcaaaactccatctcaaaaaaaaaaaaaaaaaaacaacggaaattttctgtaatattttagtaaggttttaataaaatataccttaaaaatatttggccgagtgcagtggcttgtgcctataattccagcactttcagaggccaaggtgggaagattgcttgagcacaggagtttgaaaccagtctgggaaaccccctctctacaaaataaaaaataaaaaagttagccaggaatggtagtgtgcacctgtggtcctagctactcagaaggctgaggtgagaggatcacttgagcccgggaggtagaagctgcagtggactgtagtcgtgtcactgcactccagcctgggcgacagaatgagaccatgtctcaaaaaaacaaaaaaaaaaagttctacctcctaaactaaaacttgaattaaagaagcaattcaaccagaggaggacaaagaggtgacagatctcactgcttatctaacctagcaagcaggaaaataactatgctgctaatttatcaaaaagagagaaagtagaatccttgcctgagaggagtttacctttttgtactctgaagacagaagagcaagacacatcttggaaatcatggtatattcaaggctttggtcaatgggctctgcccctgactgttgtgctccatttctgatcagccatgtcctgcagctcagcagcagatggtgtggccaggcccctgatggtggggacagccagggtgagtggctggagggagtcagggggctggtcacagacacatggagtctgagacagaggcaggatgtgtagctagagccatgatgcatcacaaagcgaatgggagaatccagtagtgacagaaacactagagctgtcgatatggaaatggccccattgcagaaacagtgaaagctcaaagaggccataagatgctcaagggcaagcatgaaggaaagatcaggaagcccaaggggtggcaggacagaagctgcagtgggaggtgattaaagcaggtgcacacagtggcaccggggcacgggaacagctctgccaggaactgaggcgacgaaaacccaagtcattgtcagccaggaaggaccacactgtcaagaaggcgcctcctgggaggggcatgagtgtggtggggtgaggtgggcatccaggaccagccaaggagtgacgtccagggtgcgccacatgcggttctttcccatgagaaagtttccatatactgctcacttaactgaaaagatggcactcacacttcagagtcttgcaagatgagtgggagaagcacatgagagatgcataagggacctttgctgagaagcaggcgggaactgctcagctgtaaactacaccaaagagtcaccgggacccagggcctacctcccagctcccacctgcaggtgcatccttctcagcttctacacagttgattcgatgctggaaggtttcccatgctcatgctccactccccgtccaccttgctgaaactgcctgagtgctgtcttaataaatacacattttctttatttcttactcaaattgaggagcctctcaacagctagaagtggttcatggttctccactccagctgcacattagactcaattggagaacttttgcaacatagcaatgccccagcttcatcccaggtaattaaatcagaatgtgacagattcactgggtgattctgagacgagaaccgggaattcagtgatacactgtacatcctttgtgatatattggtaaattaataggctgttattaagaatatcctgaagagcctcatgcagtttctatagaaacagtatggaggtttggttcctcaaaaaaaaatttttttttttttaagcagagtctcgctctgtcgtccaagctggagtgcaatgacatgatctctgctcactgcaacctctgcctcctgggctcaagtgatcctcccacctcagcctcccagtagctgggattataggcacctgccaagactaatttttgtatttttagtagagacagagtttcaccatgttgcccaggctggtctcgaattcctggcctcaactgaccgtcccatctcagccccccaagtagctgagactacaggtgtgcatgtattttttgtagagtcggagttttgccatgttgcccaggctggtcttgaactcccaggctcaagagatacacctgctttgacctctcctcaaaaaattaaaaacagaactaccatatgatctggcaatcccactgctgggtatttatccaaaagaattgaaatcaggatcttgaagagatgtctgcactcactgttcatagcaatactagtcacaatcgctaagctgtggaaataacctaaatgtccattgatggatgaaaggacaaaggaaatgtggtgtgtaaatccaatgacatattaaaaagaaaggaaattctacaatatgcagcaacacggatgaaccttgagaacattatgctaagtgaaataagccattacaatgtggttaccaggggctaggggcaggggaaaaaggggaattgctaatcaatgcatataaagccctagagatcttctgtacattttccctatagttaacaatacagtattatgcacttaaaaatctgttaagagggtagatacattgtgttcttactacaattaaaaaatgtttaaagaatgtttttaaataatagtctaaaggaaataaaagataagctacaaataagagaagacataatcaacaaatgattgcactaataacaggtacaggcagggtgaggtggcccacacctgtaatcctaacactttgggaggccaaggcaggaggatcacttgagtccaggagttcaagaccaacctgggcaactgggcaccttgtctctacaaaaaattaaaaaataaaaattaggcttgggcatggtggctcacgtctgtaatcccagcactatgggaggccaaggtgggtggatcacctgaggtcgggagttccagaccagcctgaccaacatggtaaaaccccatctctactaaaaatacaaaaattagctgggtgtggtggtgggcacctgtaatcccagctactcaggaggctgaggcaggagaatcacttgaacccaggaggtggaagttgcagtgagccgagatcgcaccactgcactctagcctgggcgacaaagcaatactctgtctcaaaataaaataaaatttaatttaatttaaaaataaaaataaaaattagccaggcatggtgacacatgcatgtagtcccaactactcaggaggctaaggcaggaagatcacttgagcccaggagttcaaggctgcagtgctgtaattacaccactgcactccagcctgggtgacggagtaaaactctgtcctcaaaaaattaaaaattagaggcagttggatcacttgaggccaagagtttgagaccagcccggtcaacacagcggaaccccgtctctattaaaaatacaaaaatcagtcgggcatggtggcgcatgcctataatcccaactacttgggaggctgaggcaagagattcatttgaacccaggaggcagaggttgcagtgagctgagatcgcactattgcactccagcctgggtgacagagggaggctctgtctcaaacaaaacaaaacaaaacaaaacaaaattttttttttgagacggagttttgctcttgttgcccaggctggagtgcaatggcacgatctcggctcaccgcaacctctacctcccaggttcaagcaattctcctgcctcagcctccctagtagcttggattacaggcatgtgcccctatgcccggctaattttgtatttttagtagaggcggagtttctccatgttggtcaggctggtctcgaactcctgacctcaggtgatccatccgccttggcctcccaaagtgctgggattacaggcatgagcaccacgcccagccaacaaacttttaattaaaaaaatatttaaagaacatgtggccgggcacagtggctcatgcctgtaatcccagctcttcgggaggctaaggtgggtggatcacgaggtcagcagatcgagaccatcctggctaacatggtgaaaccccatctctactaaaaatacaaaaaattagccgcgcgtggtagtgggtgcctgtagtcccagctgctcgggaggctgaggcaggaggattgcttgaaccccagaggcggaggttgcagtgagccaagatcgcgccactgcactccagcctgggcgacagagcgagactccgactcaaaaaaaaaagaacaggtacagaattcctagccctatttttttaaatgggcaaaagacatgaagaggcatttcaccaaagggggaacacatacagccaacaggcactcagagggatgcttggcctcctcagtaatcagggaaatgtaaaccaagataagagatagtacttttcattcattccactggcaataattaaaaatctgacaatgccaagagctgaaaaggttctggattaaagacatcacttatatatacatgagggaagtgaaaagttataatgatatgggaaaaccactgggcattttctcacaaactctgaaattcacatgcctgacaactcagaaaaccactctcaggtgcgtacctatgacaagccccacacatctgccgcaggagacaagttccactgagtgagaacattcacaaccctatgcccatgggcagatgatatggtggtgatatttgctcatgatgaaataatatacaacccaggaggcgggggttgcagtaagccgagatcacgccactgcactcagcctgggcaacaaagtgagactctgtctaaaaaataaaaaaaagaaaagaaatagtatacagtggtgaacattaattaactttagctaaacacaaaaagcatgggtaaacttttaaaccataatgtggagtgaaaaaaatcaagtccatcaagcatatgtaatggttaattttatgcatcaacttggctgagccatggcacccagtttttggtcagacgctagtcttgttactgtgaaagtattttttagatgaattaacatttaagtcagtagcatttgaggaaaacaaatgagcctccatattgcgtgggcctcatccaatcagttgtaggccttaagagaaaagactgaagttcccaaagagggaattctgcctcaagaaggccttcagactcaagctgcaacatctaacatcaactcttccctgcatctccagcccaacaatccgtcctgcacatttggggcttgtcagcccctataatcatgtgagccaattcttttttttttttttttttgagatggagtttcgctcttattgcccaggctggagtgcaatggcgtgatcttcactcactgcaacctctgcctccagggttcaagtgattctcctgccccagcctcccaagtagctgggattacagacatgcgccaccacacccagctaattttgtatttttggtagagatggggtttcactatgttggtcaggctggtctcgaactcctgacctccagtgatccactcatcttggcctcccaaagtgctgggattacaggcatgagccactgtgcccggcctgtgagccaattctttactgaaatctcccagatagatacatagatggataggcagatggacacccagctcggtggttcacacttgtaatcccagcactctgggaggccaaggctggtggatcacctgacgtcagaagttcgagaccagcctggccaacatgatgaaaccctgtctctactaaaaatacaaaaactagccaggcgtggtggtgtgcgcctgtaatcccagctacccaggaggctaaggcaggagaatctcttgagcctgggaggtggacgttgcagtgagccaagattgcaccattgcactccagcctgggtgacagagtgagactccatctcaaaaaaaaaaaaaaaaggcagatggatagatatcctattggttctgcttctcttgagaacgctgactaatacaatgtataatatgattctctttttataatgtttaaaaaataaaactaaatgattttttaaaaataatttaggattttggccacctgagaggtgggggaagaataaaatatggaaggaagacatatagtagatttgaattattgtcagtgttctagttcttgagttggctggtaattcaagaagttttatgaaaacattattagcaaatgaatgaatgaataaatggattaacaatgagagtgtatcatgaaccaaagattttgatcagtctaatcctgtgcataaaataaaaatttcatgttacacatcagtatgcatggttggatcttagttatgtaatacaaatatatatacatatatatatttatacacccatatatgtgtaaatttgcatttaaaattttgcataggaaaaactcagaaggctagacactaatatctctgtgtagcacgcagcattctgaatcatttacatgttcttattttgtttcttttctgaaatttcaaaattttctacaataaaagcatatttgtcaaaggagaacacatttttattttttattttttatttatttattttttttgagatggagtcttgcttttgttgcccaggctggagtgcagtggcacgatcttggctcactgcaacctctgcctcccaggttcaagcgattctcctgcctcagcctcccgagtagctgggattacaggcgcccaccaccatgcccagctaatttttgtatttgtagtaaaaacggggttttgcaatgtcgaccaggctggtctcgaactcctgacctcgtgacctgcccacctcagcctcccaaagtgctgagattacaggcgtgagccaccacgcccagccaagaacacatttttaaataggagaagaaacatagtgacatcatcaggatgttctgttgaaactcagttatgattgtctaatgtgcgttcattttcatgtttaatgaatggaaagttgaaaattgtgtactacttttcaatttaattccattaaatatttagtgagtgtttacaacgaagatacaaaaataagagatagtccctgaccctaaggagtttgcaagtatgcaggaaaagaagacttcagaaatagctgcatcctaaggcagaacatggtaaatgcttaagagtataccagagggctgtgtgtctctgtccagagagaactcaccatggctcagaggcccttagaagatcttcatagagattctaaataggcaagggaccaattacaaggatttcatgctaaactagacagtgaaaacgaaaagaatacaatgggaaaaagagcactaacaaaatttattttaaatcatttttaaaacatttcaagaagttgaaggtttctttttactttttatttttacataatttcagactttgagaaaagttgcaagaacagcacaaagaatttctgtatatggctgggcatggtggctcatgcctataatcctaacactttggaaggctgaggctggaggatcacctgagttcaggggttcaagaccagcctggccaacatggcaaaactctgtctctactacaaacacaaaaattagctaggcgtggtggcgcgtgcctgtaatcccagctactcggaagactgaggcgggagaatcacctgaacccaggaggcagacgttgcagtgagccgagatcacaccactgcactccagcctgggcaacagagtgagactccgtctcaaaaaaaatatataaataaataaataaaataaaaagaatttctgtatatccttgttaaaaaaaaaagctttagaaacaagtttaacagtttatctgagtaaataacaattcctgaatcaattagcactcagaatcagaagaggttcagggccgggtgaggtggctcatgcctgtaatctcagcactttgggaagccgaggcaggcacatcacaaggtcaggagatagaggccatcctggctaacacggtgaaaccccgcctctactaaaagcacaaaaaattagccaggcatggtggtgggcgcctgtagacgcagctactcgggaggctaaggcaggagaatggagtgaacctgggaggcggagcttgcagtgagccaagattacgccactgcactccagcctgggcgacaaagccagactccatcttaaaaaaaaaaaaaaaaaaaaaaggagaggttcagggacctctgcctggcagtgaacagtgagcttttataggctgaacacaaaaataaagaaatcacttgattggctacagccaggcatctgccttatttgggcatggtatgatgagttggcggcctgtcatttgctgaagcttggctgttgtgattggctgaaatctggctatttattacaaaaaacatactcttaagttttggtttctttatatactaagttaggttgcattgtattatgccggaattcaaaaaacagagacagcctcaggctaatggcctcctgcttatttaaatttttttggagacaaggtctcactctgttgcccaggctggcctgagctcaagtggtcctcccacctcggcctcccaaagtgctgggagtacaggtgtgagccaccacacccagccagcatatttaatttaacaccctttaccattctccaactgttaatactttcccacgtttgctttatcattctctgtgaatgtgtatgcctttttctgaatgagtgtaaattgcagcaattatgtctctttcatttctaaatacttcagtgtgtatttcctaaaaacaaagatattaccttacataaccaaagtacaattatcaaaatcaggaaattaacattaacacagtgttattatctgatttacagaccttaatgtttgttatggcaaagaagagcccaaacacatactgtcattacttctcttaattttcctttaatctgaaaccattcttcagtttttctctttcatgacactgacatttttgtagttatttcatagcctgtggttttgtggaatttcccccaatgtgagtttgtctgctatttcctcctgatgagactcaggttttgcattttgtgtggaaatactaaagaagtgatgctatgtccttcttggtgatcgtatcaggaggttcatgatgcccatgtgtcccatttctgctgctgttaactgtgatcactgggataaggcagtgaatgccaggtttatcactgtagagttgctaattttccttctgtaattaatatgtacttctggggagactatgtaattttttttttttttgagacagagtctcactctgtcgcccaggctggagtgcagttgcacaatctcagctcactgcaacctctgcctcccaggttcaagcgattctcctgcctcagcctcccgagtagctgggattacaggcacgcgccaccatgccaagctaatttttttgtatttttagtagagatggggtttcaccatgttggtcaggttggtctcaaactcctgacctcgtgatccacccacctcggcttcccaaagtgctgggattacaggcgtgagccaccacgcctggccaatgtatatatttttactcagcaaactttaacccactggtttcaaattccatcatttttcccatatttatcatgtggcattctattataaggaagaacgattcttgctctcatttatttatgtatatcagcacgtatacatgaatccttattttattcagtagctgatattctcttgctattattatttatttcatgattaaattgtcccagatttagccagcaggagtgtccctttgcctgttgctatcattatttatttcaagactaaattgtcacagatttagccagcaagagtgtccctttgacatgtcccctcgtttttttgtttttttgtttgttttgttttgtttttttgagagagtctcactctgtcgcccaggctggagtgcagtggcacaatctcggctcactgcaagctccgcctcccgggttcacgccattctgctgcctcagcctcctgagtagctgggactacaggcgtccgccactatgcccagctaattttttgtatttttagtagagacggggttttaccgtattagccaggatggtcttgatctcctgacctcgtgatccgcccgccttggcctcccaaagtgctgggattacaggcatgagccactgcacccggccatccctcctttttttaaagacttactttctgacacaagatattccaggctcaatttatgttttctcttctctaacccaaaatcagtcatttctccaaggagctctggttccttttagagcatggtatcaacaaaccaagatctgggtcccagttgtgcttgttccccccgaggccatcattgcttctagcacacatacatgtgttcaaatatacacgcacccatacctatgtggccgtgtgtatttctatatctgtatgcatatgaatttgcatatgtatgtatttctatatctgtctgcatgagtgtgaattcgcttatgtgtgtactcccatatctgtgtgtaaatatgcatatgtgtatttttttttttgagacaggtcactctgttgcccaggctggagtgcagtggcgcgatctcagctcactgcaacctctgcttcctgggttcaagtaattctcctgcctcagcctcccgagtagctgggattacaggcatgcgccatgacacccagctaattctttttgtatttttagtagagactggattttgccatgttggccaagctggtcttgaactcctgacttcaagtcatctgcccacctcggcctcccaaagtgctgggattgcaggcgtgagccactgcgcccagccaaatttctatatcaatctctgtgtgtgtgtgtgcatgtaatgaaatcatgagctcctaccaatatctctaaatctaatccaaccataaggtttgtcctaatcttccctctttctgtattttaacttccttcagttaaagatgtttttaaaggtcatggatatagttcaggctgttatcattaatgacagcatccagaaaccctgcccctccatcacatggccttgttttgtgctcagcacagacttgggcattgtccagcctgtgcgagacccttgctctaatcaggcagaagggcagacggagtaaccaggcaggggtctggttctgagccagaaggcccttctggaaggttcaggggaggcagaaatagaatccccaggaaatgaggggttccagtggagcagggggagcgctaggattttctgagtgagatgagaagcaagaacagatgggctgttggctgtctccacagaaagaccacaagtgacctatgggcgcttggaaaggtcaaacctgttccccacagcagctgggaccagagcccctgactggaggctttgttggcacaacagctggccctggccaggggtcaggggcagctgggagtctaggaggaggcttctcatactcagctgttggctgagagacagggcatgaagggcagaagccaccccacagaaggccatgtgtgtaagtccttcccctattgtttcaggatataaatgagtgggttcaaacaccagtgaccctggttatgactgcctcagacctgcttattcatcaccagctgatatgctttccaaccactatgttcctaggcatcctgttcccttgaagatcattgcatttgggggtttcaactccctcatccaagtacatctgtgttttatttgcaggttctctccacccaacattagctgaaaccagtagagtcttatagaatatggagccagccaggagatttatggagaaagctcaaccatattcatgaataacatcaataacagcagcaacatatttgagcatggatgtaccaaacacatccacaagtggcctgcacacaataccttccttactgctcaggcagctctgtaaggtgcaagtgcctgccctccaggagggcatgacccacagaagtgaagtaacttgtcccaggaacactgggcagtgaaggtttggaatgtttcaaggctccagttttttgtttgtttgtttgtttgtttgtttgtttgaaacagagtcttactctgtcatccagactggagtgcagcggcacaatctctgctcactgcaacctctgcctcccgggctcaagcaattctcctgcctcagcctcccaagtagctgggattacaggtgcccatcaccatgcccggctaatttttgtatttttagtagagacgaggtttcaccgtgttggccaggttggtttcaaacccctgacctcaaatgatccgtctgcctctgcctcccaaagtgctgggattacaggcgtgagccacacgcagggcctcaaggctccagtcctttaacatatcaatcttccaggggctcatgaggcccccagggagcactaggtgagtgcagactccacagggcacagcaactgtgcctaacgcagcttcccaacctctgggcgtgccagaagaggaactacaaatcatggagggcagctgatttgattgataagccctgaggctgagaactccgcttcctggaacccaatactaacacaaggaattgattttctaccttacataagacaaaaatccccagaataaacggcaggtgtgggccttctgcccagagccagaattaggcaatctctttagactgtgcaagatgcacaaacttcctttcagccacacaaatccaaaaaacatcactggaggcttcaaagcaagccagctggatacttggcccagagtgtcaagctgcaaagcatttgcagcacggggtgcctggcctgggaatctcagtgtcagcacccgctaggatggcatatcctggacaccagtttctcctaactgtcatcttgtcttgttccctctagttcagtttaatgcctgatgggcaggaaaggcaaagaagactgcagcttctaagcagctcaaagcaggagggcccaggaagcacatatgcagtctccatccatcgcaatccccttttgaccatccccaagctctcctgccagcctgtccctgaccctgggaccttcaaccatctcctcgtcctcttctcagcatcaggcacaacaggcaacgtctcactcactacgggaagttgagccagccaggacgtgaggagttttcagattgtggtcaggaagcactcccggcaaacacaaatggggacaaactacaaaataatcggccttcatatttcaaaatgtcactcatgtgaaagacaaagagagacccagggatggctccagattaaagagagtggggtagctgggcgcggtggctcacatctgtaatcccaacacttttcgaggccaaggtgggcagatcacctgaggtcaggagtttgagacgagcctggccaatatggtgaaaccccatctctactaaaattacaaaagttagccgggcatggtggcacacacctgtaatcccagctactcaggaggctgatgcaggagggtcgcttgaacctaggaggtagaggttgcagtgagccaagatagcgccactgtactccagcctgggtgacagagtgagactctgtcttaaaaaagaagtggtggttgggggtgggcctgtggcagttaatgctgcaaaagtctcctttgctgtagaggatgcaatcaagacacttggtgaaatctgaataataaagtctgcagattagacaacattgtcagatctgtgctggtttctcgattttgattgttgtgctctagataggtgagagaatgaccttgaatagacactgaagtgtttaaaggtaagtggtcatcatatttcagtttattctcaaatggttcaggagaaagaaaaatgtcaaatagcgtgtgtgtgtgtgtgtgtgtgtgtgtgtgtgtgtgtgtgtgtagagacagagatgaagaaacataaagatgaaaagcgtaatgacacaaacaccgtgatgttaacattttggggaatctgtgtgaagaatactattattgcagctgttctgtaagtttacattttaagtttaaaaggaaggccgagctcatgcctgtaatccaactttgggaggccaaagcggttagattgcttgagctcaggagttcgagaccagcctgggcaacatggcaaaaccccatctctacaaaaaatattttaaaaattaactgggtgtggtagcacatgcctgtaatcccagctactctgggagctgaggtgggaggattgcttgagtccaggaggcagaggctgcagtgagcagagatcacgccattgcactccagcctagacaaccgagcgagaacatgtctcaaaaataaacaagtaaaaagtctacaaggaaaagcaatgagggaaaaaaggcgtgcccaccctgcaatgtgcaaacccttcctcattctccaggcctggttctcctgaatgcccagctttgtctgcccatggctggccatctgaggctactgtccccaggatctggcacccccacaaccatctcccagccctggcaaggcccacttccatctgctgcctccagcccagactcccagctcctccaaggtgcagatctagcccatcctgcttctgccctagtcttggccaggccctggggctgttcagcaggcttttagtccagcccaggcctcacaggtctttgcagcctcctccttagtgtggcctcactcttaggccctttcaccaagaactcctccaacttccctcctctccactggaagctccagtatctccttttctctccttgatctcagaagaaaaaggatgccttctcatgttctaggacccaattcctttcctgagtgcccaacttctgtgcctactccaggcctcactgagaggcttctgtcatgacccctcagcacccctctcctctcctcagcctcagagctggctcaggtttctctggggtaaaacagccttcatcctgccttcctttgccagtacccatcttttgtcaccttctgccacatgaaatacctcctcaatctacacttcctgcccctgcatttacttgtgagcgttctgacatctggcttccatcccctggggccccaaagtgacacagtgtcagagacacagaatttagaatcagaagactcgagttccagtctctgctccacctcctaagagctgggtgatttgtgatgtgtttccaaaacttgtgggaagcccaagtacatagttcatatacagctcactatgaactatcacctgtgacctcacagtcttctgaccccttggcctttctctctcctcatcctcttcatctttccctgatttccccacacaaccctctctgagcctgatgtccactccacctgtctgctggtggctcccaaacctgcatctctgttacttgcctcttttctggactctgattctctgagttccagagacacttggaaatatcctctcaggcattcggccagctcctcaaatttaacatgccaacagtgagatccatcctcaattacgctcaaattgccaaaaagcagtcaaagcagggactcaaggccactaagaagtaaaaaacttctgaggaaagtatttgatattccaaaaatgcatcaaagcagctcatcctgttatgtgccatgtattgtgaattacacaggggagaagtacctaacatctgcagcaaggggaactgtgaaagcctcaattcagtgtttgatatcatcttcatctaaagagttcatcctcttagccttattttgctaaggttagccttggtccctcatcatctgagcacctacttcaaaataatcctcggccaggcacggtggctcacgcctgtgataccagcactttgggaggccaaggccggcggatcacaaggtcaggagtttgagaccagcctgaccaacagtgaaaccctgtctctactaaaattacaaaaattagccaggtgtggtagcacacacccatagtcccagctactcgggaggctgaggtaggagaatcacttgatcctgggaggcaggtggcagtgagccgagaccgtgccattacactccagactgggcgaaagagtgagactccacctcaaaaaataaaataaaaataaaaaaataaaaaataggtcaggtgttgtggctcacgcctgtaatcccagcacttttggaggccaaggcaggtggatcatgaggtcaggagttcaagaccagcctggccaagatggtgaaaccccgtctctgctaaaaatacaaaaattagccgggcacagtagtgggcgcctgtaatcccagctacttgggaggctgaggcaggagaatcgcttgaacccgggaggtggaggttgcagtgagccgagatcacgccactgcattctagcctgggtgacagagaagactgtctcgaaaatgaaaataaaaataaataaataaataaataataaaaaataataatccggctgggtgtggtggctcatgcctgtaatcccagcactttgggaggccaaggcaggcagatcatgaggtgaggagttcaagaccagcctggccaacatagtgaaaccccatctctactaaaaatacaaaataaaattagccaggcatggtggctggcgcctgtagtcccagccacttgagaggctaagggaggcgaatcacttgaacctgggaggcggaggttgcagtgagcggagatcgtgccactgcactccagcctgggcgacacagcaagactctgtctaaataataataataatcctccaactgggtgcagtggtgtgtgcctgtaatcccagctacttgggaagctgaggtaggaggattacttgagcctaaaagttcaagacaagcctgggcaacataacaagaccttgtctccgaaaaaaaagaaaaaaaaatcatcctcctctccttctctcatgccccacatttagttttcgaatcctgagccaaaggccccacatgctccctcccctcccaccagcactgccaccagctgcacccaatccttgctggctcttgtctgcaacacagtcattgcctccaactaagagcccatcctaggtcccaccctaacccacccatgctatcctctactatggatcacttccttgaagcacagagctcgaggtgttacacttctgttcgcacagtcaagtggctcccccttgactcttcaatctagcccaagctccctgcctacaagtcaaaggcctccccagtaggacccagtctaactaccttccagatccattgttcaccacttactcctcatagatgctgggctctatccaaactgaacttctcaccatctggggacatatgttccctctgcccaaaataatctacccctgtctccacctgttgagatccatccctaaaggattattcaataaatagtactggaacaattggttagtcatttggaggaaattttttaaattcttcactcatactatacaccaaaatatatttcagatagttaaacgtaaaatgtaaatatatagtaaaatcacatatataaaaaataaaaccataaaaagcttccaaaagtgttcaaaaacatgactaccgaatatctgaaaggggagaagatcctaggcttaaagcaaagaatgaaatttcaaaagaaacaagcaatata

SEQ ID NO: 14470 - DNA, 2642 bp, Rattus norvegicus
  ref <308>: DATABASE ACCESSION NUMBER: EMBL / X56328
  ref <309>: DATABASE ENTRY DATE: 1999-04-12
gaattcataatacataggacataattctatcctagctgcgatagtgcatgtggatgttactgcatggaaatatcacctgtcacttcagagttaggttacaaacacacaaaaagtgaaaacaggctggttaaatatacctgaaagattggtcactcagcattattaatatttaaccagtcatgagcatagagaaggctaaattcacacctttttcaccaagcggatacacttttcctgggggctgccaattgcagggtgacagcacagttcattcacggggtggatcatggaaacatgtacatagagtaaattgctctgttttcatgtatgagagaagtaaatgtggagacatgctgtatttcaacacagtaagtattatttactcacaaactgtaatgcattaggaattgcttttctggggctgtggatactaggaagatcatagcctaaaactacagaaaatgcattcaatggtttgcacaccatttctttgtcattagtggcttgtaagtaacaggcatatttctgtcacttatgtcctaagtcacaggcctacagagatcctcagactcactggggctttcttatctttgtctatgcttgaactttaatctactactccatctaagtctgaaatgaaaaggaaagaatggaaaagatacctttacaaatctgttgggagaagggaccaaacagaaagaaagaagaaaagaaaaagggtaaattccgtgaaaactgaaaaaaaaaagaaaagaaaaaacctgcagctggagggtcactttctccgaggcaggggccctactcgacactatctttgtaggaatgctatctaagccttaccctactggaccccacccctgtcttgaccaatagtctcggagtcctggggatggggaaggggggaaaggtccagggtgaagaataaaaggacaggccttcagcctcttgaacacacttgcttctgcacacctgagatcatctccaagcttctagacctcacaccatggttcacttcacagctgaggagaaggctgctatcataagcatatgggaaaaagtggacttggaaaaaattggaggagaaaccctgggaaggtaggtcagagaccaggactggggaggaatggagggaaattgtccttgttcatggcagaaattttcaagcttcctttaggggtttgggacacactctgactttttaactgctaatgccctgtatcttaggctcctgattgtttacccatggactcagagattctttgacaaatttggaaacctctcttctgctctggccatcatgggtaacccccggatcagagcccatggcaagaaagtgctgacgtctctaggttcggcagttgagaacatggacaacctcaaggagacctttgctcatctgagtgagctacactgtgacaagcttcatgtggatcctcagaacttcaaggtcagttctgagaatgtgttccttatgaattttactagtcacaatacttggagttgagattgtgattggtaatgccttgacagatgctagagtgcacagatccagaactcacgtcagtgaccacgtggtagaagtcctaattaatgtttagctgtccaagtattgtggaagacaaggattggggtgcaggttagactgagctatcaccatgcttgggccttggatttgattcctagcattggaaacgaagcgttcaaataccgtatttgtttttaaggagtaggtttttagaaattagtacatctatgcaagcagaaactgaatttgaatttgatatcttgccattagaaaggaaaaaaaacttaatttattggtttattcttaatgatcaaccccttatggaagatctgacaggaaatcaaaatacagatttttcttaacatcttgacaaactttctaaatattttacattcccactgagcattgtcataatttaaggcttcattctcactggttggacactcaactctactaagtatctcgtactgcaatcatgggctttggccactgatgaatgagacagggcataaggattgaaggatgtaaaaaaagagcaggatgagaaaaggtacagatatagccagttgggtagggtgggtacaagaggagtcatgtaattcagttgtcaagtgtatcacagatgaagtggtaggtagtgagggcttggaatcctcaaggaatataatttttacatgtcatggttttgaatctttacctatcattcctatgtgccattttgttacagctcctgggcaacatgttggtgattgtcctttctactcattttgccaaggaattcaccccagaggtgcaggctgcctggcagaagctggtgatgggtgtggccaatgctctgtcccacaagtaccattaaatttccattccagtagaccagcaatccattctgtctcttatactccctttgagcccatggggactggattgggcattgagagcacaaattttgtttaataaaattaattttaaataatttaacattgactttttgggctttgtttgtatttacctttctgttgaagaaagattatgatgggcttattggtggaaaaagaagaaggaaaaaactagatagactagataaacactagaggcaaggatatattatggaaagggg

SEQ ID NO: 14471 - protein, 147 aa, Rattus norvegicus
  ref <308>: DATABASE ACCESSION NUMBER: SWISS-Prot / CAA39767
  ref <309>: DATABASE ENTRY DATE: 2003-02-01
MVHFTAEEKAAIISIWEKVDLEKIGGETLGRLLIVYPWTQRFFDKFGNLSSALAIMGNPRIRAHGKKVLTSLGSAVENMDNLKETFAHLSELHCDKLHVDPQNFKLLGNMLVIVLSTHFAKEFTPEVQAAWQKLVMGVANALSHKYH

SEQ ID NO: 14472 - DNA, 815 bp, Homo sapiens
  ref <308>: DATABASE ACCESSION NUMBER: Refseq / NM_005330
  ref <309>: DATABASE ENTRY DATE: 2002-01-24
caacaaaaaagagcctcaggatccagcacacattatcacaaacttagtgtccatccatcactgctgaccctctccggacctgactccacccctgaggacacaggtcagccttgaccaatgacttttaagtaccatggagaacagggggccagaacttcggcagtaaagaataaaaggccagacagagaggcagcagcacatatctgcttccgacacagctgcaatcactagcaagctctcaggcctggcatcatggtgcattttactgctgaggagaaggctgccgtcactagcctgtggagcaagatgaatgtggaagaggctggaggtgaagccttgggcagactcctcgttgtttacccctggacccagagattttttgacagctttggaaacctgtcgtctccctctgccatcctgggcaaccccaaggtcaaggcccatggcaagaaggtgctgacttcctttggagatgctattaaaaacatggacaacctcaagcccgcctttgctaagctgagtgagctgcactgtgacaagctgcatgtggatcctgagaacttcaagctcctgggtaacgtgatggtgattattctggctactcactttggcaaggagttcacccctgaagtgcaggctgcctggcagaagctggtgtctgctgtcgccattgccctggcccataagtaccactgagttctcttccagtttgcaggtcttcctgtgaccctgacaccctccttctgcacatggggactgggcttggccttgagagaaagccttctgtttaataaagtacattttcttcagtaatc

SEQ ID NO: 14473 - protein, 147 aa, Homo sapiens
  ref <308>: DATABASE ACCESSION NUMBER: Refseq / NP_005321
  ref <309>: DATABASE ENTRY DATE: 2002-01-24
MVHFTAEEKAAVTSLWSKMNVEEAGGEALGRLLVVYPWTQRFFDSFGNLSSPSAILGNPKVKAHGKKVLTSFGDAIKNMDNLKPAFAKLSELHCDKLHVDPENFKLLGNVMVIILATHFGKEFTPEVQAAWQKLVSAVAIALAHKYH

SEQ ID NO: 14474 - DNA, 301 bp, Rattus norvegicus
  ref <308>: DATABASE ACCESSION NUMBER: EMBL / AA875407
  ref <309>: DATABASE ENTRY DATE: 2000-03-03
tttttttttttttttttgctaaatttccactactaggggctcatttatttagcctacatctccccaattttaacctctatcttttccttctttttttgactaggatggcttataatcctggtcatttttaaaaaagtctttcggggattcttcttcagtaagcatttatagattcttaagatatttttccccccaaatgatggtggaactaataaccttttttttttttttttttttttttttttgggacaagatcttttattcctgtttggactagagcttactgtgtagaccaggatgg

SEQ ID NO: 14475 - DNA, 412 bp, Rattus norvegicus
  ref <308>: DATABASE ACCESSION NUMBER: EMBL / AA891068
  ref <309>: DATABASE ENTRY DATE: 2000-03-03
gctctgaaaacactttattacacaaattacattcagattctgaaaaatagtgttctaacagtgtaaccatctaaaaataagacatcccggaaacacaccaactgaggagaaatttaaaaatgaatttaaatagagactttttaaaatttctctcattgcaatataatgttagtgattttaaaaaaatagaaggagatttagcagcttttcgtcgtgtggcaggttggttctcttcactgccacaggctgagaatgctgaacaggaaaggcaccaaagaaagacactggcgatgggtgtggactgggagaatactgtgttcaagcagagaatagggctatttacatccaccaactaaaacgtctccaaatgtgaatgagctaaacttccctcgggggttggagcgctaccttg

SEQ ID NO: 14476 - DNA, 2994 bp, Homo sapiens
  ref <308>: DATABASE ACCESSION NUMBER: EMBL / S75037
  ref <309>: DATABASE ENTRY DATE: 2000-03-04
ggcgccgctgcccaaccgccagccccagccccgcgctgcgctgcccggtcctctcccggcggggtcgtatcggcgtggacatggctggccgcgtccctagcctgctagttctccttgtttttccaagcagctgtttggctttccgaagcccactttctgtctttaagaggtttaaagaaactaccagaccattttccaatgaatgtcttggtaccaccagacccgtagttcctattgattcatcagattttgcattggatattcgcatgcctggggttacacctaaacagtccgatacatacttctgcatgtctatgcgaataccagtggatgaggaagccttcgtgattgacttcaagcctcgagccagcatggatactgtccatcacatgttactttttggatgcaatatgccttcatccactggaagttactggttttgtgatgaaggaacctgtacagataaagccaatattctgtatgcctgggcgagaaatgctccccctacccggctccccaaaggtgttggattcagagttggaggagagactggaagtaaatactttgtactacaggtacactatggggatattagtgcttttagagataataacaaggactgttctggtgtgtccttacacctcacacgtctgccacagcctttaattgctggcatgtaccttatgatgtctgttgacactgttatcccagcaggagaaaaagtggtgaattctgacatttcatgccattataaaaattatccaatgcatgtctttgcctatagagttcacactcaccatttaggtaaggtagtaagtggatacagagtaagaaatggacagtggacactgattggacggcagagccctcagctgccacaggctttctaccctgtggggcatccagttgatgtaagttttggtgacctactggctgcaagatgtgtattcactggtgaaggaaggacagaagccacacacattggtggcacgtctagtgatgaaatgtgcaacttatacattatgtattacatggaagccaagcatgcagtttctttcatgacctgtacccagaatgtagctccagatatgttcagaaccataccaccagaggccaacattccaattcccgtgaagtctgatatggttatgatgcatgaacatcataaagaaacagaatataaagataagattcctttactacagcagccaaaacgagaagaagaagaagtgttagaccagggtgatttctattcactactttccaagctgctaggagaaagggaagatgttgttcatgtgcacaaatataatcctacagaaaaggcagaatcagagtcagacctggtagctgagattgcaaatgtagtccaaaaaaaggatcttggtcgatctgatgccagagagggtgcagaacatgagaggggtaatgctattcttgtcagagacagaattcacaaattccacagactagtatctaccttgaggccaccagagagcagagttttctcattacagcagcccccacctggtgaaggcacctgggaaccagaacacacaggagatttccacatggaagaggcactggattggcctggagtatacttgttaccaggccaggtttctggggtggctctagaccctaagaataacctggtgattttccacagaggtgaccatgtctgggatggaaactcgtttgacagcaagtttgtttaccagcaaataggactcggaccaattgaagaagacactattcttgtcatagatccaaataatgctgcagtactccagtccagtggaaaaaatctgttttacttgccacatggcttgagtatagataaagatgggaattattgggtcacagacgtggctctccatcaggtgttcaaactggatccaaacaataaagaaggccctgtattaatcctgggaaggagcatgcaaccaggcagtgaccagaatcacttctgtcaacccactgatgtggctgtggatccaggcactggagccatttatgtatcagatggttactgcaacagcaggattgtgcagttttcaccaagtggaaagttcatcacacagtggggagaagagtcttcagggagcagtcctctgccaggccagttcactgttcctcacagcttggctcttgtgcctcttttgggccaattatgtgtggcagaccgggaaaatggtcggatccagtgttttaaaactgacaccaaagaatttgtgagagagattaagcattcatcatttggaagaaatgtatttgcaatttcatatataccaggcttgctctttgcagtgaatgggaagcctcattttggggaccaagaacctgtacaaggatttgtgatgaacttttccaatggggaaattatagacatcttcaagccagtgcgcaagcactttgatatgcctcatgatattgttgcatctgaagatgggactgtgtacattggagatgctcataccaacaccgtgtggaagttcaccttgactgagaaattggaacatcgatcagttaaaaaggctggcattgaggtccaggaaatcaaagaggcagttgttgaaaccaaaatggagaacaaacccacctcctcagaattgcagaagatgcaagagaaacagaagctgatcaaagagccaggctcgggagtgcctgttgttctcattacaacccttctggttattccggtggttgtcctgctggccattgccatatttattcggtggaaaaaatcaagggcctttggaggattctgaacacaaactcgagacgagttcaggaagagtactgggaagatttagaggaaagggaagtggaggcttaaaccttggtaatttctttgcaagccgtaagggctacagtcgaaaagggtttgaccggcttagcactgagggcagtgaccaagagaaagaggatgatggaagtgaatcagaagaggagtattcagcacctctgcctgcgctcgcaccttcctcctcc

SEQ ID NO: 14477 - DNA, 513 bp, Rattus norvegicus
  ref <308>: DATABASE ACCESSION NUMBER: EMBL / AA891108
  ref <309>: DATABASE ENTRY DATE: 2000-03-03
aacaggacttttattggtagtaaactagagcaaacaatcagaataatacatatgtagtattcagtacacacaataaaagttaaagaaattcaaaacctgtataaaacaaaagagagagagaaatcatacagcttaagagatacaggggtaaaggtcctctccatctttgatcacacttgtctctgtacccaatagaacttactgcacttaataagacatacagacattttagtactgagtgtattaaaagaattaaacacttttctaaaaatctttcaatgacaagttggtaccctttagctaactaaagctaaaaggtgggaggtgggaaaagggaattaactagtattttgtaaccatttttaataatttcttattttccaaacactgcttttataacagaagtgttttacacttgcacagtattaattactttattatacatggaagcctgtggtacgctggttacacaatgagactgcaaactaccagtggtactttcctgacgtcaga

SEQ ID NO: 14478 - DNA, 712 bp, Rattus norvegicus
  misc_feature (1)..(712): n=a, c, g or t
  ref <308>: DATABASE ACCESSION NUMBER: EMBL / AA891834
  ref <309>: DATABASE ENTRY DATE: 2000-03-03
ataacatatatctttaattaagttgatactggtaaattaaaaaaaacattcagtgagaagatgacagttaagaaaataatgtattctatgactattttgataaaatgtttaaaatataaaggttttaaaagtccattgtctttttctaattgaagggagaagaccaagcaaatattgtcttcttatacaaatgagcctacaggagaataattcttacatgggaagcaccaggataataagaattgttaatttggcattttttctcaaaaccatcaggagtatgcaaaaacaatatataaaacaggagattgctccattggatatgataagttgataagttttacatgaaccactaaaattctgatcaaagttacttaaaggatgtgttttctttaagtcagataagaatttatgggctaaaatcccaattaatttgattccagtaataacttgatggtaagataaattctctcccatgaatatcttgctgtctatagagtaagatttcatagatttttttcagaagaggggcttatcccggatcacatctaaatgactcaacattttgagctaagaggttgtttacagaatatacacattttttttttacttacagagcaaaataagattaacactcgtctattaaaaacctgggggtacattaggattagtagcaacatganaaagaatacttcctcaaactgcagtcagt

SEQ ID NO: 14479 - DNA, 592 bp, Rattus norvegicus
  ref <308>: DATABASE ACCESSION NUMBER: EMBL / AA891922
  ref <309>: DATABASE ENTRY DATE: 2000-03-03
aataatagatggtttattgggaaccctcataacatttttcaaaaggacttgacagcttttattctactaagacagagtggagaggaaatggcttaagagatgtgatcaatcttttatttaactaagtacggcccttcattttgaaggaaatgatacaatttcaaactggaaccgccttctcaagaagtggtgaaagaaaactgatttaacatacaacctccaatcaaattaaagattctacagcttgctgggaaataaaatgcatgtggagtacgtttcctgatttataaccaagaacaaaacatacaatgaagtgatgaataaaatagtcaaatttatcgggatcctgatttttaaacagttcacaaataaaatctaattttttcaaacaaattcattggatgactatgatcaattctacttcaattgttttaaaaaatagccagacaagtacatgatatcaagagtcttcaacacagtggatcccattttaagaaagaaagaaagaaaaaggtaactaccggtccttaaatttccttagctttccataggatatgtcatataaaattaaagttttgcttccaaaaaaata

SEQ ID NO: 14480 - DNA, 31737 bp, Homo sapiens
  ref <308>: DATABASE ACCESSION NUMBER: EMBL / AC021396
  ref <309>: DATABASE ENTRY DATE: 2001-06-08
gaattccattttgaatcttttttaagactaggagaattaaaaaaattttttcaaggtttctgcgtttctaaaagtgagtatgtaggatgaatagttcataaatttaggaaaacattcctatgccctttttgttaaaaaagacaaaactggggggagcggggagggatagcattaggagatatacctaatgctaaatgacaagttaatgggtgcagcacaccaacatggcacatgtatacgtatgtaacaaacctgcgcgttgtgcacatgtaccctaaaacttaaagtataatgataataaaagtaaaaaaaaaaaaaaaaaaaagacaaacttcagtggtgatctgcagtggggtcggggtggggggaggaagttgaaacagaggggagagaaagtgccctgaaaaataaaggggctttttttaaatgttgacttaaatttctttttttttatttctataggtttttggggaacaggtgatgtttggttacatgagtaagttctttagtgttgatttgtgagattttggtgcacccatcacaatgttggttttttatttatgttctctttccataggtttttggggaacaggtggtgtttggttacatgagtaagttctttagtggtaatatctgagatttttggtgcactcgtcacccaagcagtgtacactgtactcaatgtatagtcttttatctctcacccgcatcccaccatttcccctgagttcccaaagtccattgtatcattgttatggctttgagtcctcatagcttagctcctaattatgaatgagaaaatatgatgcttggttttctattcctgagttacttcaaataaaataatagtcttcgattccattcaggttgttgtgaatgccattacttaattcctttttatggctgagtagtattccgtggtgtgtgtgtgtatatatacacatgtacatatatacatccacgtgtgtatgtacacatgtacatatatacatccacgtgtgtatgtacacatgtacatatatacatccacgtgtgtatgtacacatgtacatgtgtacatccacgtgtatatatatctctctcacacattttctttatccactcaattgatgggcatgtgggctcgtttcatatttttgaaattgtaaattgtgcttctaggaataagcatgtgcaagtatcatttttgtataatgacttcttttcctctgggtacttagtagtgggattgctggatcaaatggtagatctacttttagttttttaatgaattttcacactgttttccacagtgattatactagtttacattcatatcaacagtggaaaagtgttcccttttcattacatccatgccaacatcgattattttttgatgttttgattatgggcattcttgcaggagtgaggaggtatgcattgtgattttaatttgcatttccccaataattagtgatgttgagcatttttccatatgtttgttcaccattttatatcttcttttcagaattatctattcatatccttagcccacttttcaatgggattgttttttgttttttgtttttttttattgttgttgttcttgctgatttgcttgggttctttgtggattctggatattagtcccttgtcagatgtatatactgtgaagattttctcccactctgtgggttgtctagaatttttatggtttcaggtcttagaattaagtctttgatccatcttgagtcgatttttgtataaggatagagatgaggctacagttcccttcttctacatgtggctagccaattatcccagcaccatttgttgaatagggtggcctttctccactttatgtttttatttgctttgttgaagattagctggctgttaagtatttgggttatttctgggttttctattctgttccactggtctatgtgccaattttataccagtaccatactgttttggtgactatgggcttatagtatagtttgaaatcaggtgatgtgatgcctccagatttgttctttttgtttagtcttgctttggctaagcaggctctctttttttggttccatgtgaattttagggttgtttttttttcccagttctgtgatgcaaaaatcctcaacaaaataccagttaaccaaatccaacagcatatccaaaagataatccaccatgatcaagttggttttataccagggatgaaaccgtgttcatcagggatattggtctgtagttctctttttttgttatgtccttccctggttttggtattggggtgatactggcttcatagaattatttagggaggattccctttttctctatcctgtggaatagtgtcaataagattggtaccaattcttctttgaatgtctgatataattcagctgtgagttggtctggtcctgtactttttttgttggcaatttttttattgctatttcaatctcactgcctgttattggtctgttcagagtttctgcatcttcctggtttaatctaggaggattgtatatttccagaaatttatccaactcctctagtttttctagtttgtgtccataaaggtgttcataatagccttgaataatctttggtatttgtgtggtatcagtagtaatatttcccgctttgtttctaattgagcttatttgggtcttctctcttctcttcttagttaatctcactaatgacctatcaatttcatttatgtttcaaagcacaagctttttgtttcatttatcttttgtatttttgtgtatttctttcaatttcatttagttctgctctgatcttcagtatttcttttcttctgcggagtttgggcttggattcttcttgtttctccagttctgtgaggtgtgaccttagattgtctgtctgtgccctttcagactttttgatgtaggcatttgaggctatgaactttcctcctagctctgcattttctatatcccagaggttttgataggtggtgtcactattgttgttcagttaaaagttttttggttttttttttttttgagacagagtctcgcactcttgcccgagctggagtacagtggcatgatctcagctcactgcaacctccgcctcccaggttcaagcaattctcctgcctcagcctccctagtagctgggattacaggcatgtgccaccacgcccagctaattttttgtatttttagtagagacagggtttcactatgttggccaggctggtctcgaatggctgaccttgtgatccacctgccttggcctcccaaagtgctgggattacaggcataagccactgcgcttggctgtatttttaaatttctatcttgatttcagtgttgacccagtgatcattcaggagcaggttatttaatttccatgtaatttcatggttttgaggattccttttagagttgatttccaattttattccactatgatctgagagagtacttgataaaatctccatcttcttaaatgtgctgaggttttgtggcctatcatataacctgtcttggagaatgctccatgtgctgatgaatagaatgtatattctgcagttgttgggtagaatgttctctaaatatctgttaagtccatttgctgtagggtatagtttaagtccattgttgttttgttgactttctgtcatgacgacctgtctagtgctgtcagtagagtattaaaatcccccactattacagtgttgccatctatctcctttctgaggtctagtagtaattattttataaatttgggagctccagtgttaggtgcatatatatttaggattgtgatattttcctgctggactaatccttttatcattataaaatatcctgctttgtcttttttaactgcttttgctttaaagtctgttttgtctgatacaagaatagctattcctgctcgcttttggtatccatttacatggaatatctttttccaaccctttaccttaagtttatgtgagtcttcatgtattagatgagtctcctgaagacagcagaaacttggttggtgaattcttatccattctgccattctgtatcttttaagtggagcatttaggccattcatcgtgctatttgttggctgaataccttctttttttcattgtgttattattatataggtgctgtgggactgacactttaaggaggttctgttttggtgtatttcaaggatttgtttcaagatttagagctcctttagcagttcttgtagtgctggcttggtagtggtgaattctctcagcatttgtttgtctggaaaagactgtacctttgcttcatttatgaagtttagtttcaccagatacaaaattctctgctgataattgttttgtttaaggaggctaaaaaaaaaaaaaaaaaaaaaaaactcaatcccttctagcttgtagggtttctgctgagaaatctgctgtgaaactgataggttttcctttataggttacctggtgcttttgcctcacagctcttaagattctttcctttgtcttgactttagatagtctgatgactatgtgcctaggtgatgatctttctgtgatgagtttcccaggtgttctttgagcttcttatatttggatgtctagatctctagcaaggctggggaagttttcctcaattattccctcaaatatgttttccaaatttttaaatttctcttcttcctcaggaacacagattattcataggtttggacattcagcatagccccaaacttcttggaggttttgttcattttttaaaattcttttgtctttggtggattgggttaaatcgaaagccttgtctttgagctctaatgttctttcttctgcttgtttaattctattgctgagactttccagtgcattttgtgtttctctaagtgtgtccttgatttccagaagttgtgattgttttttatgtatgctacctatttcactgaagaattttcttttcatatcctgtatcacgtttttgatttctttaagttgaacattacttttctctggttccttcttgattagcttaacaatcgactgaaattctttttctggcaattcagagatttcgtcttggtttgaatccattgctggtgagctagtgtgatcttttggggtgttaaaagaccttgttttgtcattgatatggttcagctgtgtcccccaccaaatctcttcttgaattgtactcccataattcccacgtgttatgggagggacccagtgggagataattgaatcatgggggtggttcccccatacttttcttgtggcagtgaataagtctcacaagatctaatggttttattagaggtttctgcttttgcgtcttcctcatcctctctttgcctgctgccatccacgttagatgggactttctcctccttgccttccaccatgattgtgaggcttccccagccacgtggaacagccaattggaacaactggaactgtaagtccaattaaacctttcttttgtaaattccccggtctcagttatgccttttttttctttttttgagactgagttttgcacttgttgcccaggctggagtgcaatggcacgatctcggctcactgcaacctctgccttccaggttcgagcgattctcctgcctcagcctcccgagtagctgggattataggcatgcaccaccacatctggctaattttgtatttttagtagagatggggtttctccatgttggtcagactggtctcaaactcctgacctcaggtgatcctcccacctcggcctcccaaagtgctgggattacaggtgtgagccaccacgctgacctcaattatgtctttatcagcagcatgaaaatggactaatacaattgtattaccaggattgtttttctggttccttctcatttgggtagactatgtcagatggaagattcaggactcaagggctgctgttcagattcttttgtcccatgggatgctcccttgatatggtgttctcccctttcccctagggatggttgtatttttgtttagcatgctggttttgtgttgattggcctccagccagaggtggtgctttcaagagcacatcagctgtggttgcatagggaggatcatgcagggggtggggctatagagcttccaagagattacgtcctgtgtctttagctaccaggatgagtcgagaaagactaccagctgggggcatggctgagctcagcctctccttgggcggggcttgctgtggctgctgtggggatgagggtgttgttcttaggtcaatggagttatgttctcagggggattatggctacctctgctgagtcacacagcatgccagggaagtggggggaaagccagcagtcacaggcctcacccagcttccatgtagctcacagtcctaaaaactggtctcactcccaccatgccctcccagcagcaccaagcctatttccaggcaggtggtgaccagggctgagaacttgctccagaccaccaggctccccactgagaaagcaagtggactcaaaggttttggcatctcatggaccctacagcagtgattcagttccttcaaagggtctgtggattctctcagctttcctggtatgttgctgtggtagttcttagagcaaaagtttataatgtaagtctccacatgctggttgtctgtccatgcgggagctgggagctagtcctgcctcctatccaccatcttcatataaagggactttttatcccacaccaactcctcagccacagcccagggtctgagtgtctttggttgagattttggaattgaagaagaaacaggagagaatcactgcagggaggaaccacttcctaggaactgctaccagactgggacctaaggagaacgaggctgtaaaacagctcatccttgggaatggccaaggaaatttatgaagaatggtatctgatacaaactttaatggatatgtcttttttgttgtaattgccggatcttattttttttaaaaaaataagtcaattaaagacaagaacagccttatggtgggggtatttgaagaatggaaaaggcaaaaattaaaagatgatggaaagctaggatttaaagtcagaatgtcgatcaggcacagtggctcatgcctgtagtcccagcactttgggaggccgaggcacatggatcacctgaggtcaggagttcgagaccagcctggccaacatgatgaaaccccatctctactaaaaatacaaaaaattagccaggtctggtgcaggcacctgtaatcccgactactcaggaggctgaggcaggagaatcgcttgaacccgggaggcagaggttgcagtgagccgggatcacaccactgcactccagcctgggcgacaagagtaaaactgtgtccccaaaaaaaaaaaaaaaaaaaaaaagccataaaataaataaataaataaataaataaataataaagtcagaatgttgacaggagactttataagtgcttccctcattagaaatcttgggaggaacactggacttctctcaactatgtagaatagggacttgagatagtttatttagatattaaagcacagggtgatatgacagaactcaggaacattaaaagcactgtctgtttaatcattaggaaaataagaggtgatgattatcttttttaactggagtgtctctctttgctgtttgaactataaataacatccccaagtctcttctgagtctgcagtggaataggaggaatatctggtctattccttccaaggcactaactcttccccttttcatgcttgcaggagtcccaggtacttaacattgaggggaagcgtgactcaaaagggcctattttattgcaattaggaagctttcaagcttagataacagaaaaactaagtttttagtgagttccagaaaaagtctgcgagaaatacacaaaacagggagaagaaaactacagaacataagaaaacattccactcatgcaatcacaagaagggtgcaaggcaagaacacagaatctaattcattggagaagcagtctccgtgaagactgagtatgcaccagttctggttaccttgatcaccccttcctcagaatcatgatgttataaccagaaaaatcccatgagcgtgtgacctagtaagatcccactgggagaaggtctgggagaatttcaggtggagaaggatcgggttaggtacagaggtccctgaaagaggaggatcatcggtgttgcagatgactatatcctttgctgacttggatacagtcagagtacataataatctaaatgtttatgtctccacagtgcttctcctgccacaccacaggccgccctgcctggaggggattttgcactgaagagcagcagcccctggcagggaatggtggggactgaagcttagttgtttgcattgccttccctatctgtgctccacagagcccagctccacaccctttaatcacagttcttttaactgaaaagtgaggatttcaatagcacctatctcaaagtggctgtaggagaattaaatgagttagtacacataaacactctgaacaatatttggcccacagtaaggtttgctaatgtgtttgctattgatatcgtagctgtttcttttcttttcttcttttcttttcttttttttttgagactggtgtagctctgtcgcccccaggctggagtgcagtggcgcaatcttggttcactgcgacctccacctccggggttcaagcgattctcctgtctcagcctcccaagtagctgggactacaggcgcacaccaccacacctggctaatttttgtatttttagtagagacagggtttcagcatgttggccaggatggtctcgatctcctgaccttgtgatccacctgtctcagcttcccaaagtgctgggattacaggcatgagccaccatccccggtcactattgttttttatattatctagcagagaaagttggagtaggacctacagtcactatttccatgtctatctgggcacaatatctgtgatgggaaatagggggcaaaggaggaaagagtgttggtagctaaatagaaggtttggaatgggtcaaattcaaaatgcagtgttgggttggagctcttggcttccagagcatccacagttcttgccccaaggacaatgggccacttcccaggattacatgagaaacccatatccaacaggcccaaacctcgggcattattgcttggttaccagtgctttcagcaaccaaacagaagacattcccagatacaaggcagatccaggagggctctgagtctgtggggtgtgattccagcatccaagtaatgccaaagcctgccagcatgcaccaaaagctaggaagaggcagggagggatgctctcctagatccttgagagaaagtgtggccctgttaacaccttgacttcatgctcctagcctctagaactatgagaaataaatgtctgctgttttaagccaccaagtttgtggtcatttgttacaacagccctagaaaaccaatagcaaaacttactgttagttgccccattgccttcacctacctcacagaaggctgtggcctctttgctcaccaacaaactctttctaacttggaatttttgtagaagggattggggaaggcattagtccttcttcctcagcataccacctgggccccttgaacaaattggtctacctcttccccagaactctgcctgtcccaaggagcagttggccacagtccatgtggagtgatttaaatgaaaatataatttcattttcaccttttcctttgggtatagccatctgacatacatctgcatgcctaccaaagaccctgcagatcagccaaagggtgacctttcacctccaccttttctgaaagtactagataacttcttccgatggcttcatttgtccttttcacttggaagaggaaaaataaatcaatccccagtgagtctttccaatttatttccatttactgattaaagaactgaggctcaaaaggtaaatcaatgtataatggtagaaaatacatcccaatgcatgtgtattcaattcccagcttgtctcctttctattataattacaacaaactccctctgtaaaatggaaaaaggcatgggctggattcaagagaccagatttataaaaatgcctttctttgcattcactttttgttgtttctatatgtttattacagggtatactataatcttcctggaataagaatatggattacacaaagtttatactcaataaatacttgagaagggaagaaagggactaagggaggagagaagagaaagaggaggaaaaagaagaaaataggtttaaaggaaagaaaggaagagatggaaaaaaagtttctcacaaacacagaggctccagctctgagttgaggcaccagttgagaacaataggaaaaagcaagtccaaactggaaaaacccacagcaatatgtggaactaaacaaagcccaaataccatgtcttacatgtctgactgcaagacatcaccactgttaagacacacattgctttaataaaagacttccagaaagagatgggagagtggggaactaacccttcattaagtgtgcacacagatgttgtagtttctcagaggttataattacagccttcctgctttcttcttcttagttagtaagcccattgagaaaaattactagtgtcagctaggaaataaaaaatcaacctcatggatgaggttgggctatagagctacggctgggatctgctgccaaaaagaaagctttacacacttcctccagatctagatctccctactaccttaagtggaatccgcagagcaacaggcttacgaccaacctatctggaacctttggatgcagtagacaagatgtcatttctgggtgaaggcagccacataggctcatggcttggcacaccaagtaagggctgcttttcaccccctgctcgtccttatgagtgactgggtgcttttgtcagcacacaaactgctcaattctttgcagctgtcctgccaggaactcactcctcagtctgcagcatagagaacttcagtgtggtccaaccctaacagaggagctgagaaaccataggcctctggatcttcccctagaagaggtcctggatccaggtgtgcctactttgtttaagatgaagcaaatggaagaaacatcacactaactaagcagccaagtggcctgaagaaatgaagacaggcagacagtgcaggagcagtggccagtgaaggtccaacccagttaatatacaccaactagtgcagaagttcttaatgttttgaccaagacccctgtattagtctattttcacactgctataaagatactacccgagattgggtaatttataaagggaagaggtttaattgactcacagttctgcatggctggggaggcctctggaaacttacaaacatggcagaaggggaagcaggcacattttacatggtggcaggagagagtgagtgtgtgttgggggaaatttcaaacacttataaaaccatcaaatctcgtgagaactaactcactatcatgagaacagcacaggggaaaccactgtcatgatctaatcacctcccaccaggcaggtcctcaacacgtggggattatggagattacaatttttttttttttttttgagatggcatctcggtctgtcacccaggctggagtacagtgccatgatcttggctcactgcaaccttcatctcccgggttcaagtgattcttgtgcctcagccttccgagtagctgggattacaggcatatgccactatgcacagctaatttttgtatttttagtagagatggggtttcgccatgttgcccaggctggtctcaaactcctgacctcaggtgctccacctgcctcagcctcccaaagtgccgagattacaggcatgagccactgtgcctggccagtattacaatctgagatgagatttgggtggggacacagagccaaacaatatcaacccacaagaagagatatgttttttggttggtcattttattctctagagcagccagaaaggcaggagacgtgttttatatccatggcccaatgcacagacacacaaacacaaagacacatacacacacgtatacacacatgatcaaattaaaattgttttagcaacaatagttacaatagtgtctgtattttattttatgtagatctcaacctttattgatttcatgacccctggtcaaagttttcaattggtcaagatttgaaaaaaaaccctgaactcataaaggttccttaagaagcagtgagagggagaaaaattagacatcaccttcctaatacttccaagggggaagagattcacattcgaggggacccagaaatatgtgaagaaaaagatagtgtgaccctgcccctgagacacagataaaatagttttaatgatggatgacaatttcagaaataccaaaatggttttaaatgcttttttgaattaaggaaccaaagtctttttcctgaactgtgacttgaatcaaaagtattttgttttcatttttgtttttctttttttcaaatatgccatactggatggcttcaaagtgtgaccaaatcaatgcattatctaaagtgattcaactggaacaaaccaaaacaacaaaacactctcagagctgaaccaatattttgtttccttcaagcctcaatggagcctgagactaaaggcttctgaaatgctgatcctagaagctgaagggccgtctgctcaagctgctctgcttccctgacttgcaccctgtgtcttagccattgccagaggctctcagctcccccaacaatccctgaatgctccaggttgcaaatcttcgctcgtgtagccccttctatttggatggctgtccttccaccccttggtcttctatctgcttgatgagcacctactcattttttaaaactcagctcaaggatcacttcatttattcattcaatttccaacaagttttaattgaagggtcaccatatgccaagacccatgttggttattggggaaaccacaggtcaaccatacatagtctctgttttaaaagcttacagtctagtcaagtgtaataggttcttatatcataatgtggtgagtacaattcaagaggtcagtaattaattcaagaggccagtggttgactccagtaatcccagcattctgggaggctgaggtgggaggatcactaaggcccaggaatttgagaccagcctggacaacatagcgagtactgagacctcatctttattaaaataataataataataaatacatagggcattatcagagcacagagggagagcccctgacttaatgcaataagtcatgtaaggctccttgaaggagctgatgcctgccgtggctggagaggtgagtaaagaggaaaggttctagggaacagcaaccatgtgagttaaatatcattatttccaatttagagataaagaaacagaggcacagaattgctaaatatatttcccaatgcacaaagttatcaaatgacagagtggtatttgatcccaacacgtgctaactctaatcattaactcaaatggtctttcatttgctgtagaaatccaaatgaggaggagatcccagtggagattggacaaaaaagaggaagaaactgaatgagtttggcatgggctgtcagatccatgatggggccaagtactaagcccagagaagacttacggagggaacagagttcggggtagggatagggacaaaccctattgtgatttgggacctgtggtaaagcaggtctgtgccatcaagtccatgcagagtatgcatatcagtgctacatgacaggtcacctgctggatgagcagttgtgatttctttttattttttattttgtttattgttattcttttttttgagatggagtcttgctctgtcacccaggctggagtgcagtggcacggtctcggagatctcggctcactgcaacctctgcctcctgcattcaagcaattctcctgcctcagcctccctagtagctgggattgcaggcacccgccaccacacccaactaatttttctatttttagcagagacagggttttgccatgttggccaggctggttttgaactcctgacctcaagtgatctgcccaccttggcctcccaaactgatgggattacaggcgtgagccaccacgcccggccttttttttttttttttttggtaccccaactcattatagggaatgaagcagtaatgatttcaaagtcaaactaagctaggtataaatcttgtctctggtagttattagtaatgtgcccttggagaatgcacttatcctttatgagtgtccttttttttttttttctgagacagagtttcgccctgttgaccaggctggagggcagtggcatgatctcggctcactgcagcctccatctcccaggttcaagtgattctcctgcctcagcctcccaagtagctgggattacaggcacgagccaccatgccagactaatttttgtatttttaatagagatggggtttcactacattggccaggctggtctcaaactcctgacctcatgatctgcccgcctcaggctcccaaagtgctggggattacaggcgtgagccaccatgcccagctcatttctttatctgtatactagggaaggcaatatctaccttatggggctatgatgaggattaaattaagtgagattacgtgtaaaagtgccaagcatatttcctggaacacaacttgcttaattcccattacttttacttccatattgcatcctttaggtgctctctctcacgttaaggagacatgcctaagtccttcgacttcatctgccacagactgggcaggagcctggaacccaaccccattatgatacaattgagttcctggcaacaaccctgactggaagtggctggggacagagtgtcccacggcctggagcagagcttgttagattaaagatggaaaaaactgggtccatctttaagagctgccaagtgaaccaggaaccacccatcccctgcaggaaggaactgttgtgtcattaataatacttagcattgtcctagtgtttttccaagctaattaattctgctccaaatcccagaaaacaaacgactgagtgagttggagacagatctcgtttctgagacagaagggtagagaagcgtgtcctctgcagtgactgggggaagagaaaagcctcatcaccacttcttagagccaagttacccagggcaaggaaagggcattgagtcctggggatggtgggtacttacctccctatctgcaagatctttaaacaggaacagtcacccaaagttgcagatacaagaaggctcacccatccctaggacacattgcccagaagtggcaggtgttggtaagctggcttcatggtccagatggaaaagtttatccttctctctctccctagagcacgggacaaagctcatgtgccaggacatgacatgtagctgactggtcaactctgtgccatttaactccatggatacttactttacagaccagaatctgggaacaccaagaatccaactccaactcctcccttcatgggagtgcagagtcaagtgtgagagaccaaaaaggcagaaagtttcattgtaaagagaaatactcagatgagggagtacaaaggatgtgaggcagtatggaaaggattcctggaaaagaatattttgagctgtttggaaagatgattaaaaacaacaaaacaaagaaatggacagaggacttaaagtcaagaggcttaaagtcaagaaagggcaaagcacattcaggaacttgaacatagttccttggagagttggggaatttcagtttgacaatgactcctgtcatcacaaaggaaagaaaggctcgtgacaagacaaacaagtgtacaaatatgtacagcacgcaatgagggcccagaggaagaaagaaagattaaaggataggagagactacttttgccttgaggggaagaaagaagtcaggggctggctaacaggtaagggtactggcttgatggggccagattaggcatttctcaggcagaaggctgagaaattattgctactgttcttgtttcctttgtggggtctgtgtggtcactgcagagtgcaatagatataagaaatctcaggtgtgtaactttgcttctaattaggcagaaggctgagaaatacttaatctggcttcatcctgttagccaatcactgacatcctccttgccaaaggctcctatcccatgagattgtatttcagtaggtctggttgggggcccaagaatcaacaccctagcagccatcccagatgacagagatgcaggacacccacacacctttttgtgaagagtggtggaaaggtcctggtgccccggctggactcaaatgcaccctgactttcatctgttctatttgcaaaaaaaaaaaaaaaaaaaaaaaaaatcccagaagctacagcatccactgtgagaggggcatagcacttcaagggagattttttttgtcttcttctaaagttctaccttttcaaatccagaagagctcctgaaacatattttcaaagattgtgttccttataggaagtccttcaagggaagggacacatcttacttgaaggcacatcctatctcctagcatagactggccaggtagattgcaaatgcttgttcaattaatgaagctgacttccttttattttctgaaaagtatcccgtgcaaatgttcgcaagcattatgttaatttgtatggctactctccgcctaggagactccctgccctaattctctcttcaaaaatgggaatccagtctctagctgttcctggattacaattagcatagggactaatgattttgtgtgttggtggaattatgtttccttcgtgggtctgtgcgatcactgcaaagtgcaacgaacataagaagtctcaggtgtgtgactccgctagtaatcagttctagaactctggaaaaatgactgcttggctccatgcttcaatctcctttttttaataaagtgagaaaattagattatttcttcattgggtcattcagtaactatttatcaagcacatgcagtgtgccaagcactatcctagttgtggggagtcaatggtcaattagacacattccattcccaccctggtgacataatgatgaaaaatgagaccagccactattcatacaatcacccatatccaaaatttggaagcatcttgggactgccctccttcttagcaattctatcgattgctaagtctagatcattctatagcctaaataatgctgtaatcaatttcctcttctctgtccttattgcactgaaatcctaaccacctcctaagtggtccctgcctctcacatgacctattaaagttcatactgttctgtggccccctgttcagctttctaaaacataaatctgattctgttactactctgtttacacatctttccctgactccctggagtcattagataagtaataatagctaatagccattgttaattatgcaccagacatttatctaaatgcctttacatacttcaacttattagctcacagcaagcacagaaggaaggtgccatcattgtcctcacgtatgctggttatttgtctgttagctgtcagcttcattcctgacttcctatgttcatctttataatgcagggggtgtggaagcctgcaaactacacttcataggctgtgatcagctgccttctggttgggctctgccagtgaaaagccttgggacaggactcaaatgctggagggaaggagaagtttgattttgcattgttttggttttgttttacccctgctttcacaaatgcctccccgagtggtgacacatcagcggaagtgcaacttctggccccctgcacagcttcagggaccatctgatagcagtaacagcaactgcacctccagaagatcagaagcacatgcaggctgggcttctgtcaaaggctgggaagagctccctggcctctgagtttctcccttctcccttttactcttctacctcttccaaaagattgtaaccaactccctgtattaaatccctctctgctggaaatacctccagtgcaatctactttcttaactgagcactgatgggtacaccatttaatgcacaaggagaccgaggtacagagaggttaagtaacttgtcccaaggcaaacagctaggaagtaacataaagcacagataaagaaaaagaaaaaaaacaaggtattgaattaagtcaaggtttcttaagcatgtcatgcaaagcccttcataattaccttcctctctccatccatattctatggtctagctggaaagtgacacctagctggagattgtgctttgttgttgtttttgttaatgaatgaaggaatgaatgccagatgtaccatacttgtgtaaaaccccagcaggaaatgtgactgcagtggacattggatgaatcagtgaataaataaataataaacaaatgaataaactccaagcacacaacaaatcaacctgggtagcaatttcctgcctctgtgttcctcccgccctcagactcagagccctgatgcatccaagagactgaatgttcacatcacttatacagagtaagcatgcgataaatgcatatttattaaactaatgaagagaagaatccatcaaaaatgcaatcaatcaagtcattgcccagtgatgtttaaaattctagtttattgaaccacaaaaatcttccaggaagaaggcacagaagaaaacctttacattttcctaaaaacaaaaacctctactataacaaccagcaaataattagacgttaatgtctctaacttaaaaaaaaaaaaaaaagtaaccacagttaatctcaggggatatcctgtatgaaaagggaaaaaacaatgagtcatggattctaacctcctgtttataaccggggcccacaaatgatctgttgctgaaggagaagaaagccattaatctcccaactcagggagcaattttatattttgaataaaaacaaaataaacagcattaaggagggaaataaatcagatatgcagtaattagtttgaaggagccggattttcctgcctaacactctctttggaacttctgccttatccatcaaagcaaaagtgtatcagatgacatggagattttccattcccttttcagacaaaattagtcagctgatgtgaatagtaatttgacaggacccagaagagagagcatgagtgatgggattataataaatgcgggagaggatgcttaataaactttggtgaagccctggatcctgcacttttcctctcctaccctctgtgtaactcctgatttatgaaattgttacttttttctctgtgaattcttagaaggcttggactttttaaaaataaagaatctaaaaaggaccttatttattttcttacccagtatccttattttaaagatttagaaggctcagcccagaaacaataattgacttgcttaagtttccacaacaaaatcagctgaagcaccaggatcaaaaacctggccacgtgcctccccgccctcaaagctcaataaagacaaaagcacaaacaattgtgaagtggttccttactgaaggcaatcttgggtctcatgcagcactttctgggtaagagcccccttgatattgtttggctttgtgtccccacccaaatctcatcttgaattgtaatccccacgtgtcaagggagagacctggactggatcatgggggtggtttcccctatgctattctcatgacagtgagtgagttctcatgagatctgatgggtttataaggggctcttaccccttcactcacctctctctctcacctgctgccatgtaagtcgtacctcttcccctttgccatgattgtaagtttcctgaggcctccccagccatgggaaactgtgagtcaattaaacccctttcctttataaattacctagtctcgggtgggtctttatggcagtgtgaaaacagactaatataccctttggtgtgaaaccacagaggaaggctgctcttccctcttcaggcttccttcctcgggcatttccctccaatcaggcactctctccagagtcctctatcactcatttgcagcttattctgaattctaatgactaagtttttttctccccattatttgggaatgtcctgctagcagttgtttttttcaggaacagtttggtaactgattcatttgaagcatagacataatgaatctctcccgatgtatctataaacccttgcataactccctttactattatgaatggagctctgcgagtaagttgtccctttccctttcatctcccaccatcccagctaccctgtttgggtctacacatctaaagtttaataaccctccagtggaaagaacagggagatgtcaaaagatgaaggatgctcatcaatgcatttgtttctaataaaaatacaataattcaaaagcagaatataaatgtccatcagtaatgaacagctaagtaaataatgattcattattcatacaacaaaaatctatgtagctattaaaaaatatagagaagaatatgtattaacataagaagatgttcagggtacattgtcaacatgtgttaatatgaagatgttatcaaatagcaattattaaatgatttaactttttacaaaaaaaggcaacaggtttttattgaaaatatgacatgatagtcccaaatatgtgatataaatatgactttttattacatttcataatatagtaaacatattcattttgtaagaaaaacaacacaatgttgttgtttttattatttttaacaaaatatccaagcagtcactctgcttaattagagaagcaatgaaagaaattatggccaagtgttctctctgactgtaaatattcagagggggcctgggttgccccatacttgagtcaccactctactttctttattttacctcttggttttgtttgtttttatttatgaagtttcatttgaacagaagtttctaagggcaggtgtgtatgtgtgctttgttctggtttcttttttagtgagtagaatgggttcttatctgtgaatattctctcattatggacaacagtaggaatgtgaacaattattgagagtctctaatgtatcagatgtcgtcctagggctgtctccaaatgttatcctgtttatttgtcatcactgctctgagaagcaggtgtgacttctgatcattttaaagcataggcacagaggcttgcaaagatgcagggacctgccccagctcatgcaggtggacaatggtgggctgagagcagtgagaaccagtcccatctcctcctacccactgcaagcaggctaccagtttggctgggggttgttggttgaagtgtatccccccaacacctgcaaccaaattcatatattgaagccctaactgtgccccacctagtatctcagaatgtaaccttaatataaccttatgtggagatagggtctttacagaggtaatcaagcaaaaatggttaatgggtgggccctaatctaatatgtatacttaaaatgactggtaaatatagatacttagtaaatatatatacttacagggactggtgtccttgtaagtagaggaaatttggacacagacgcatccagagggaagatgatgtgaagacacaaggaggggatagccattgcagatcagtgagagaagcctaggaaagatttctccttctgtggactaaagaaaaaatgaagcttttaaagaattaaaggtaggttcattcagaagcattactgaggaccacagactgaggccaatagcccaggagcagccctttagagaggtcctatcagactgccccaacacagtatttaagccaatgcccgtatacaggtggtggaggtttaatatgggcaaaatcacatcaaacttgccaagaagctacattaaagcagaattacatcaagattaaccagaggtacatcagagtacctctggttaaagactacagaggcataatcactaattccatcagacgttgttttataaagtgtaggaaaaggcaagggctagggccatttatcttttaaggaatttagtgactcaggcaagagacggggtcatgtgctctaccctcttttgtcttcaaagaatcctcccagagagctgcactttgtcacagcatcaggggctttgtgaaattatgctagcaagcagaagtgagcaaatacggctttttgcatttgctgctttgtctcacacttcacagccctcaaaggagccaatgctgcagacgccttgattttggacctccagcctccagaactgtgagaaaatacatttctgttgtttaagccactcagttaatagtccactgttttggcagccctaacaaaccaataaaatgagttacctggtgatcacatgaaacgtcagctgtgatgacaaaaaggtgcccttaagaacacaaaacaactggggtccaccatgtggaagcagaagcctgcaaggagtgaaactgcaggaaaggaagaaatgcccagtagaagagaggccccaggtgctcgctctggcagtacatatactaaaattggaacgatacagagaaaattagcatggcccctgtgcaaggatgacacacaaatttgtgaagcgttccctatttttaaaagttaaaaaaaattttttttaaaagacaggaggtcccaggaagccctgctgcctctctgcccaccctctccaggccaaccctgctaccaggaagaaattcacagggccaaattactcagtcatgtgtattgaggccagaaatgcattatttaattttttgcagcagatgtacctttttaatactgttttgtttcaggctaaaattacaatattaaaatttaatattcaaacattagcatgagtttgcatttcttgaatgtccacccacctttttcctccagcatatgtggaatggcaacagggaaggggtgggaagaggacaaggctgtggctgctggtcttagctccgcatctgagtggctctgtggccttgatcacattgctccactcctccagggtttggttccctcctctctcaaatgatggaaataacctgggtgttctagaaggctcctgcacctcaaagtattcccaagtctgtgtatctctggagactggagggagccaagaagagatggacaacagatgcctgagcagaactgatatgtatctgcacttttgccgtcatcagatgttggaggggtcttggagagagccatgaacaagagcatctcccagtgttgatagggtccctccagacttttagggagaaaagtaaagaaaaattcctagtggttgttcctatatctcttgcaaaggataaaaggtaaacattatatgtatactttttttttttttgagactgactcttgctctgttgcccaggctggagtgtagtggtgggatcttgtctcactgcaacctctgcctcccaggttccagcagttctcgtgcctcagtctcctgagtagctgagattacaggtgtgcgccaccacacgcagctaatttttgtatttttagtagagacagggtttcaccatgttggccaggccggtgtcgaactcctgacttcaagtgatctgcctgcctcagcctcccaaagtgctgggattacaggcttgagccactgtgcccagcctcattacatgtattctaaaaattaaagattttctgactgcaaagtcctggattattatactgcaaagtcctggattctgtgactgtatgtgtctgacagtatgtgtgtgtatgtgtgtatgcctatgtcacacactcatgtgcctcggtttccctggtatcccaagaaaatttttagtttttctttggggtaattacaccttgaaaaagcaggtatttcaggactccttccttttctgtactctgaagtccagctcttaatttctactattggtgagagtgcaagtcgatgtcacctgacttagtacatgggcgtgctctctagtctctcaggttgaaagtctctctgctgtgactcatatcctcactctatgcaggaggaatttttttttttttactagacctttacatgaaattagatagagttaacttatctctctcctggcacttcttgtgcaggtccgccagtcaaatccagcagactgcaaaaatactagactttctccactgaagagtcaggtaatgccagaagagtattatggcacagcaatactcctcagagcaaacgttggcttttcagctaacttagaagttccctggaaaatgcttcttaagccttagagaagagagacagtctttttcatataacatagccaaaccaagggcgtgacactccgtcaccgtcaccatactctgctgattagaagtgattcacagtttctgcccacaatgaacagaagaggtaagtcactgcgggtcacctttaggtgtgtccaccacaccattcttcccaaaattttgtaagacttcttgcacatgccaggcatggtagctcacccctgcaatctcagcactttgggaggccaaggcaggcagattgcttgaggtcaggagtttgagaccagcctggccaacatggtgaaacctcatctccactaaaaatataaaaattaggcctagtggtacacacctgtaatcccagctactcgggaggctgacgcaagagaattgcttgtacccaggaggcagaggttgcagtgagccgagatcgcatgactgcactccagcctgggcaacagagcaagactctgtctcaaaaaatatataaggaagcttagtagggcatggtggcacacacctgcagtcccagctacccaggaggctgaggcaggaggattgcttgagtccgggagttcaaagctgcagtgggctatgattgtgcagctgtactccagcttgggtgacagagcaagatcctgtctccaaaataataataataattaataataataataataattgaaagaataaaaaaagatggggatagagatgaaacaaaattggccatgagctgataatttttgaagctttgtatttagttatgcagtaggtctctgtattattcggcctacttttaaatacatttaattttttgcataataaaaaaataaccgacaagaaacagtgatcaagttagtaataatccttaccatatttcagcaattctacatgccagactctatgctaagtgcctcatttacatcatctcatttgattctcacaacagccatatcagaaagtattaatagtgtatttataaataaaaaacctgcttctctggtaggttaaatgacttgcccaagtatttcaagaaccagatgctgtgttctcacttatgagtgagagctaaatgtcaagtatatatggacacaaagaagggatctgcagataccagggcctactggagggtggggggtgcatggagggtgaggatcaaaaaactacctattgggtactctacttagtacttgggagatgaaataatctgtacctcaaacccttctgacatgaaatttatctatataataaacctgcacatgtacccctgaacctaaaataaaagttaaaaaaaaaaacaatctgcctacaaactcaaaacaaacaaacaaaaaacagatgctgaatccaagtctcctttgatttcaaagcccatattcttttttgtttgtttgtttgttttgtttttgagatggagtctcactttgttgcccagggtggagtacagtggcacaatctcggctcactgcaacctccgcctcctgggttcaagtgattctcctgcctcagcctgccaagtagctgggattacaggcatgcaccaccatgcctggctaatttttgtatttttagtagagacgaggtttcaccatgttggccaggctggtctcaaactcctgacgtcaggtgatctgcccacctcggcctcccaaagtgctgggattacaggcatgagccaccacacccggcctcaaaacccatattcttaattactatttcaagttaagtcagcaagtataggttaagtgcctataatgaagcactgggaaggtgacaacaattagaagatgtgacgtttggtctcaaggagatcaaggccgagaaaatatttattcattgcaattctggccctggatcaaccacttacaaatgaggagaggcaaattatctcaacacaccagaacttaggccctttacctgtttgatgagatcgtagaatccatcctgcgagtcacagaggacagtagggaagatcaaatgaagtcatgtaaataaaagccacgaggaacagtaaagggctgtataagtaaaaaggacaaaatgaagcaacagtaatggcactattgtggttgaagataagaagcctttagcctacttagatttttagtgttctaaacccatctgtcctcagccctgtggtttttccttcatgagagctcctcaacaaattcatgtatagggaggttggccctaagaacacccaggacagtgacatttcagaggcattgtagagaagctcagttatcacattgcagtgtcttcctctcccggactgtgcttagcacacaggagagccacatatggggactgggaattatttctgatgtagcgattgggaaatcgtgacaatgtatactaatgaggtgacaagaaagacggtgtcagatgcacattaatctttagcctgatgtccttcatgatgtccaacctccagtttcatctcctgccacactcatcccccatacttccactcttcacactggccttactcaaaatgcagattccaggactcaggctatctcactgccttcttacttacaattcttataccagaacacccttcctcctcccctcatctgaatcttacctggtttttgaaatttaagtcagggccttcttaggaagatttccctgattcagatccaagttgaattatgataaccctcctttggctcccataaaatcttataacttcctaactgtgttttatgaatagttgtctagtttagcactatgtcaggagctattgacagcagggctgggcacagtgactcacagctgtaatcctagccctttgagaggccaaggtgggaggactgtttgaggacacctcaagcccatccagcctaggcaacagaatgagatcttgtctgtacaaaaaaacaaaagattaattgggcgtggtgacgtgcacctgtagtcccaactacttgagaggctgaggcaggaggattgcttgaccccaggagatcgaggctgcagtgatccatgatggtgtcactgcactccagtctgagcaacagagcaagaccccaccccccaaaaaagctattgagggtagcagtttactttcattgctctacctcgagtgcctacagaagagcagagcacatttaggtactttgtgtgattacttattgaataaaaggatggtatatcacagaaaataattaacctatttctccttttaatggtgatggttctttatcactaagtgttctttgctgagtactacattggttttgagtgtgcaaacatggaaacggctgcctccagtctacactgttcattgtaattaagaggagagagatttggaggaccgaaaaatcagaaatggtggaagaggagtccttaagggcatggccatattattttttgtaagcctggccgctatcatagatcaactttggccgggcacggtggctcacgcctgtaatcccagcactttgggaggccgaggcgggcgatcacctgaggtcgggagtttgagaccagcctgaccaacatggagaaaccccgtctcaactaaaaatacaaaaattagccgggtatggtggcgcacgcctgtaatcccagctactcaggatgctgaggcaggagaatagcttgaacccaggaggcggaggttgcagtgagccgagatcgcgctattgcattctagcctgggcaacaagagcgaaactctgtctcaaaataaaataaaataaaatgacaacatagatcaactttgacatttcattggcttaatgaaatgaaagtttatttctcacttatatgaagttcaattctcctttttttttttttcacccgcgtaagcccccaaaagatgattctgacagcaaggggtagaggtgaggattgctgtttggatttgattggctcccacagtcatactgggagccaggttaatagaggcttcagtaccaagagtccctgagcttcaatatccaaccagcagggggagaaagagagagaggggattgtccatggaagttttcatgggccaggccatgtcacttctactcatgttccattgagtaaactcagccctacggttacatctaactgcaaaggcatctgggaaatgtagtctagctacgtgcccaagagcaagagaaaaccacctttgcggatcacataataatttctactgcaaaggttgagaggtggggaatgtcaaaaatgaagaaaagcaaaggtaagataggagggaaataggggaagaaaggctaagggaggaaggcagaagagaggaggcaaaacagcacggaggaatctgaaggagtctgtggtgagtagtgttatacagcctctactccagtgtgctgaaaacaaccttcagtgtactacattgcttagtaatgattgtgagtagatatagttgggaagggactagcactgaagaataaggacaaagctaacatgtgggtgatagaatgagctatcaacacaattgcatgcttcttccagtatgatttcgtttgtcgaaacatgactgacaactccttttgggtaactccctctagaagcaattcccagccttccaagaaaatctccgactttttaaaaaaggaaaagttactaaatttagtccctagtaatggcatggccaagattaaggcccagtctgtaaatcccattgtctctctactctactagtggagttaaatgtgagagaagaaaatgtgaaccctgagccactcaggaattgagaagctttcatttctctcatgtctattatgcacttgcttgctttcactaaaacctcctaacctctcagtaaggcgtcattatctctacagatgaagaggctgcaattaccaaggccacgtcgctggtaagtggcagtactaggaataagaattcagactgctaattgtatcaacaacataataaaatttaacatttatttatttagcatttcctatgtgccaaacagaataccaagaactttacccgcattattgaatgttaatcctcaagacaaacctatgagaagtactagtagtatccccattttccagatgagaaaactaaaatagaacggacattgtttatccaggtgttcttagcttctgacagtggggctagtatttgtacacaggtgttctgactgtgagtccgttggactagcctcctctcttcccactgtcctgctcaagctctgtcaattataccccactgcttcctgaaaacatatttgctatatgcaacccccaccccccgccccaagaagagaatatattttggagtctttatgtctcagaagatcactttaaagtccctttcatatgagtgaccaactatcccggtttgactggacctgttccagtttggctcttagagcctttcgtcctgggaaactcttcagtcctgagcccactgggactgttggtcaacctatttcccactctgaaatctgtgagtttatacactttttgcaagaccctctgttctaccctggaaagagaaggatcaattgtgcacaccctcagaatttcacctcttctctcaattagtcagacttaagttatctaccctgtttttccccttttaacctactcctatagctgcctaagaaacatgtgaaaaatttgacacccttggcagaaatgagggtctataatatacttcatgggttatgcagttttattgtccatgaagactttaatgagggatcagtcttcatttttagtaagtcatctaagcagtgcatttgagactgggtaccactaggaatcagcaagtccccctgtggcctgtgctgtttctgaaccaagagaactaagagaagccatgaccagaagctgagataagaagcacctagtgagatccaggacaacttttccaaagactacatatctttaaacactgtttgaggcataatcctagattgttgattcaaatgtggcacaggagtaagttagctttagagatgtcatagtctgaaataagagcatgttagcaggccatctgtagaggagaagtttgcctgggtgggatctgaaatatgaacaaaaattcaccattaccattaaccagctgcctcactttcctttaatttcatgttagggttttgtttctttagcttgccacccataacaaagtatgtcatcctgggatctttttttttttgagatggaatctagctctgtcacccaggctggagtgcagtggcgcaatctccgtctcgcatgttcaagcgattttcctgtgtcagcctcctgagtagctgggattacaggaacctaccaccacacccggctaatttttgtatttttttagtagagacagtgtttcactatgttggcaaggctggtctcaaactcctgacctcatgatccacccacttcggcctcccaaagtgctgggattacaaatgcgagccaccgcacccggcccattccggggtcttaatcagcaataacaaagtaccacaaatagggtgttttgggtggcttaatcaacacatttttttctcacagttctggatactagaaataccaggatcagggtaccagtatggttaggttctagtgagagcgttcttgctggcttgctgatggtggccttcttgctgtgtgctcacataatggtgacagagatagagctctggtaactctttaaggcccctaatcccatcatggggccccactctcatgacctcatccaaatctagttatttcccataggtcccacctccaaacaccatcacactggaggcctaaaattcaacatatgagttgggataggggttagcacaaatattcaacccatgacaccctgtgtcaggagctccagagtcttctttactccaatcagaagcaagcccctacctgtgcagaatcatcccagacgcaatgacagataatgctcttattcaagggggaaagcagttttaataaactttatatcttgagataattttaaattaaatattaaatttacaaaacaattttaaagattaacttaacaaaacaattgtaaagataatggagcactcttatactcctcacccaatatcctttattgttgatatcttccgttaccatggcgcatttgtcaaatctaagaagccaacagtggtacattatttttaatggaactttagattttctttggattttaccatttttttccacaaatgtcctttttctgttccaagaaccaatccaggataacacattgtacctacttgtcacatctcttgagtctcctctggtctatattgagatggactttataatctcagtctttacttgtttctgatgacctttacagttttgaagaatatgaattcagtgttttgttgaatgtccctcaatttgggtttgtctggtgaaaaacggcttttatttagcaatagatcagactagattttggttctaatctgaccagatgattcatagcataa

SEQ ID NO: 14481 - DNA, 2176 bp, Rattus norvegicus
  ref <308>: DATABASE ACCESSION NUMBER: EMBL / AY027527
  ref <309>: DATABASE ENTRY DATE: 2001-05-15
ctttccgtcccaagcaccgagcggagcgcagcacccccgcgccggcggtatggcgctgtcctggaggagctggctggccaacgaaggggttaaacacctctgtctgcttgtttggctgtccctaaatgtcctgcttttctggaaaaccttcctgctgtacaaccaagggccagaatactactacatccaccagatgttgggcctaggattgtgtttgagcagagcttctgcatctgtcctgaacctcaactgcagcctgatccttttacccatgtgccgcacagtcctggcttaccttcgcggatcacagaaggtccctagcaggagaacaagaagattgttggacaaaagcaagactctacatatcacctgtggcataactatttgtattttctcaggtgtgcatgtagctgcccacttggtgaacgccctgaacttctcagtgaactatagtgaacatttccttgcactgaatgcagcaagataccagaatgaggatcccagaaagcttctcttcacaactgttccgggcctgacaggtgtctgcatggtggtggtattgttcctcatggttacagcttctacctatgcaataagagtttctaattatgatatcttctggtatactcacaacctcttctttgtcttctacatgctgctgctgctgcatgtttcgggtggcttgttgaagtatcaaaccaatttagacactcaccctcctggctgtatcagtcttaaccggaccccatctcagaatatgtccatagcagactacgtctcagaacattttcatggatctttgcctggagggttttcaaaattagaagatcattaccagaaaacactggtgaagatttgcctggaagaacccaagttccaagctcatttcccacagacctggatttggatttctggacctttgtgcctatactgtgctgagagactttaccgatgcatccggagcaacaaacctgtcaccattatctcagtaatcaatcatccctcagatgtcatggaactccgtatgatcaaagaaaactttaaagcaagacctggccagtatattattctacattgtcccagtgtatcagcattagaaaaccacccatttactctcacaatgtgtcctactgaaaccaaagcaacatttggtgtccactttaaagtagtaggagactggacagaaagattccgagatttactactgcctccatcaagccaagattctgagattctgcccttcattcaatctagaaactaccccaagttatacattgatggcccatttggaagtccatttgaggagtcactgaactatgaagttagtctgtgtgtggctggaggcattggggtcactccgtttgcatcgatactaaacactctactggatgactggaaaccatacaagctaagaagactgtattttatctgggtctgcagagacatccaatcattccagtggtttgcagacttgctctatgtgctgcataacaagttttggcaagaaaacagacctgactttgtgaacatccagctgtacctcagtcaaacagatgggatacagaagataattggagaaaaataccacacattgaattctagactttttattgggcgtcctcggtggaagcttttatttgatgaaatagcaaaatgtaacagagggaaaacagttggagttttctgctgtggacccagttctatttccaagactcttcataatttgagtaaccggaacaactcatatgggacaaaatttgaatacaataaagaatctttcagctaaaaccttaggagactactgggactctaaagaaggaacaagtgcaatttctaagacttagagactcggctgaatcagacagctatgctatgccaaagaatatcaaagttttgctatttatgattatttaaaatgagaattcaaaaagtgtggcaaaaatgacatggttaatctgcaagccaaaggggccctgaagaatatttgatgtggtgattcacatattgatgggcaaattaaaagaatgctgttagatgcacactgttgatttttatgggaaattcaagaactctctaatgaggagctgaactcactcactctgaagctgatagccacagccctctttaaattgttttcagtcgaacaggttcaaagattgaacaaaattaaaaattc

SEQ ID NO: 14482 - protein, 578 aa, Rattus norvegicus
  ref <308>: DATABASE ACCESSION NUMBER: SWISS-Prot / AAK14799
  ref <309>: DATABASE ENTRY DATE: 2001-12-01
MALSWRSWLANEGVKHLCLLVWLSLNVLLFWKTFLLYNQGPEYYYIHQMLGLGLCLSRASASVLNLNCSLILLPMCRTVLAYLRGSQKVPSRRTRRLLDKSKTLHITCGITICIFSGVHVAAHLVNALNFSVNYSEHFLALNAARYQNEDPRKLLFTTVPGLTGVCMVVVLFLMVTASTYAIRVSNYDIFWYTHNLFFVFYMLLLLHVSGGLLKYQTNLDTHPPGCISLNRTPSQNMSIADYVSEHFHGSLPGGFSKLEDHYQKTLVKICLEEPKFQAHFPQTWIWISGPLCLYCAERLYRCIRSNKPVTIISVINHPSDVMELRMIKENFKARPGQYIILHCPSVSALENHPFTLTMCPTETKATFGVHFKVVGDWTERFRDLLLPPSSQDSEILPFIQSRNYPKLYIDGPFGSPFEESLNYEVSLCVAGGIGVTPFASILNTLLDDWKPYKLRRLYFIWVCRDIQSFQWFADLLYVLHNKFWQENRPDFVNIQLYLSQTDGIQKIIGEKYHTLNSRLFIGRPRWKLLFDEIAKCNRGKTVGVFCCGPSSISKTLHNLSNRNNSYGTKFEYNKESFS

SEQ ID NO: 14483 - DNA, 2416 bp, Homo sapiens
  ref <308>: DATABASE ACCESSION NUMBER: Refseq / NM_016931
  ref <309>: DATABASE ENTRY DATE: 2002-11-05
tgagtgggcagagctgacccggtgcgggtgggagtcagggcgcccggaaaacccggctctgggtagcagaccccgcccgggctggctcggcgccgggccttcgggcttccactcagtctttgaccctcggtcctcgctcagcggcccggcaggccgcacaactgtaaccgctgccccggccgccgcccgctccttctcgggccggcgggcacagagcgcagcgcggcggggccggcggcatggctgtgtcctggaggagctggctcgccaacgaaggggttaaacacctctgcctgttcatctggctctccatgaatgtcctgcttttctggaaaaccttcttgctgtataaccaagggccagagtatcactacctccaccagatgttggggctaggattgtgtctaagcagagcctcagcatctgttcttaacctcaactgcagccttatccttttacccatgtgccgaacactcttggcttacctccgaggatcacagaaggttccaagcaggagaaccaggagattgttggataaaagcagaacattccatattacctgtggtgttactatctgtattttctcaggcgtgcatgtggctgcccatctggtgaatgccctcaacttctcagtgaattacagtgaagactttgttgaactgaatgcagcaagataccgagatgaggatcctagaaaacttctcttcacaactgttcctggcctgacaggggtctgcatggtggtggtgctattcctcatgatcacagcctctacatatgcaataagagtttctaactatgatatcttctggtatactcataacctcttctttgtcttctacatgctgctgacgttgcatgtttcaggagggctgctgaagtatcaaactaatttagatacccaccctcccggctgcatcagtcttaaccgaaccagctctcagaatatttccttaccagagtatttctcagaacattttcatgaacctttccctgaaggattttcaaaaccggcagagtttacccagcacaaatttgtgaagatttgtatggaagagcccagattccaagctaattttccacagacttggctttggatttctggacctttgtgcctgtactgtgccgaaagactttacaggtatatccggagcaataagccagtcaccatcatttcggtcataagtcatccctcagatgtcatggaaatccgaatggtcaaagaaaattttaaagcaagacctggtcagtatattactctacattgtcccagtgtatctgcattagaaaatcatccatttaccctcacaatgtgtccaactgaaaccaaagcaacatttggggttcatcttaaaatagtaggagactggacagaacgatttcgagatttactactgcctccatctagtcaagactccgaaattctgcccttcattcaatctagaaattatcccaagctgtatattgatggtccttttggaagtccatttgaggaatcactgaactatgaggtcagcctctgcgtggctggaggcattggagtaactccatttgcatcaatactcaacaccctgttggatgactggaaaccatacaagcttagaagactatactttatttgggtatgcagagatatccagtccttccgttggtttgcagatttactctgtatgttgcataacaagttttggcaagagaacagacctgactatgtcaacatccagctgtacctcagtcaaacagatgggatacagaagataattggagaaaaatatcatgcactgaattcaagactgtttataggacgtcctcggtggaaacttttgtttgatgaaatagcaaaatataacagaggaaaaacagttggtgttttctgttgtggacccaattcactatccaagactcttcataaactgagtaaccagaacaactcatatgggacaagatttgaatacaataaagagtctttcagctgaaaacttttgccatgaagcaggactctaaagaaggaatgagtgcaatttctaagactttgaaactcagcggaatcaatcagctgtgttatgccaaagaatagtaaggttttcttatttatgattatttaaaatggaaatgtgagaatgtggcaagatgaccgtcacattacatgtttaatctggaaaccaaagagaccctgaagaatatttgatgtgatgattcacttttcagttctcaaattaaaagaaaactgttagatgcacactgttgattttcatggtggattcaagaactccctagtgaggagctgaacttgctcaatctaaggctgattgtcgtgttcctctttaaattgtttttggttgaacaaatgcaagattgaacaaaattaaaaattcattgaagctgaaaaaaaaaaaaaaaaaaaaaaaaaaaaaaa

SEQ ID NO: 14484 - protein, 578 aa, Homo sapiens
  ref <308>: DATABASE ACCESSION NUMBER: Refseq / NP_058627
  ref <309>: DATABASE ENTRY DATE: 2002-11-05
MAVSWRSWLANEGVKHLCLFIWLSMNVLLFWKTFLLYNQGPEYHYLHQMLGLGLCLSRASASVLNLNCSLILLPMCRTLLAYLRGSQKVPSRRTRRLLDKSRTFHITCGVTICIFSGVHVAAHLVNALNFSVNYSEDFVELNAARYRDEDPRKLLFTTVPGLTGVCMVVVLFLMITASTYAIRVSNYDIFWYTHNLFFVFYMLLTLHVSGGLLKYQTNLDTHPPGCISLNRTSSQNISLPEYFSEHFHEPFPEGFSKPAEFTQHKFVKICMEEPRFQANFPQTWLWISGPLCLYCAERLYRYIRSNKPVTIISVISHPSDVMEIRMVKENFKARPGQYITLHCPSVSALENHPFTLTMCPTETKATFGVHLKIVGDWTERFRDLLLPPSSQDSEILPFIQSRNYPKLYIDGPFGSPFEESLNYEVSLCVAGGIGVTPFASILNTLLDDWKPYKLRRLYFIWVCRDIQSFRWFADLLCMLHNKFWQENRPDYVNIQLYLSQTDGIQKIIGEKYHALNSRLFIGRPRWKLLFDEIAKYNRGKTVGVFCCGPNSLSKTLHKLSNQNNSYGTRFEYNKESFS

SEQ ID NO: 14485 - DNA, 112 bp, Rattus norvegicus; identical to SEQ ID NO: 13262
  ref <308>: DATABASE ACCESSION NUMBER: EMBL / AA892551
  ref <309>: DATABASE ENTRY DATE: 2000-03-03

SEQ ID NO: 14486 - DNA, 396 bp, Rattus norvegicus
  ref <308>: DATABASE ACCESSION NUMBER: EMBL / AA892762
  ref <309>: DATABASE ENTRY DATE: 2000-03-03
aagagttttagcaggctcttaaaaactcagtagtattttagagctgagaaattaaggcttagaaatgaagacatttgtttaaaataccttagccagtaaccagctcttcgggagtggtgaacccagttctgcctaccacccaagtcatgtcttccctccactttcttggaagggctgaggtgagcatagtccctgaccatctgggactttttctttcaggagcgcaggatctatgcgatggccacatcaggcatgcagctgtcagatgtgtcgtcccgaaatactgcttcctgtttcggtgagtacaagtggtgtgtggaggcctacagatctccttatgggcctggcccccgttccctgcgtgcagcaggcatggaggactgccaaagtagatac

SEQ ID NO: 14487 - DNA, 546 bp, Rattus norvegicus
  ref <308>: DATABASE ACCESSION NUMBER: EMBL / AA892881
  ref <309>: DATABASE ENTRY DATE: 2000-03-03
gggcatgtagctcatttaatatggagaccaggataccacatactaattctttacgttggaggttcacttctttacaaactacaaaatctacccagagatcaacactctcagatatttactttttccctcaaaaatgcccttaaaacagagtgacattatgttacttgaagttaggcagggataactaacagtgatgggatccatctctaaggtgacttgcaacattttgtttctgtctctgttcccacagtttaaaaaatgccttttggactgacagtggagtactatggtatttctcatcgattaattaattaaagtcctggcatattcatttcagaggtatctaaggatcaaaattacgttctcctcttttaaaaacctatttcataggaagtatacctaataaagcgtcctctgagccaatagaaagaagtgtgaaatgtactagagcgatcgctgtttcaatgttaaaaagcaggttccttcctttcctcaacttgcttcagattaagtgccatccaggagaaatgacaccatgttgtttac

SEQ ID NO: 14488 - DNA, 465 bp, Rattus norvegicus
  misc_feature (1)..(465): n=a, c, g or t
  ref <308>: DATABASE ACCESSION NUMBER: EMBL / AA893043
  ref <309>: DATABASE ENTRY DATE: 2000-03-03
ggtcagtgggtcagcaggccggaagggtacacccagaatttgttcctcgtttgagactcaagaaaaattgctcaggaaacatgatttcatttgtatttcttcctgaaggaaggaaatttgtaaaaatctgtaatcgtgaaacagattttttttttttaatagcaagagataatagctgattccttttcatagctgggattttactctgagagaattcggactttaattttggttattcagacagggtctcacaaggtccaagctggtctgaaactctgtaagtaggccagattggcctaggacttactgtaattctcctgcctctgctccctgagtgctaaactaccacacccggcctcaaaagatcctgttttcctgnaaggccggaggctaaggagcgtttggtgagcaaagacggcgccgcttctgtgagtccaaccctcctgagtttccattgcatgatta

SEQ ID NO: 14489 - DNA, 654 bp, Rattus norvegicus; identical to SEQ ID NO: 13286
  ref <308>: DATABASE ACCESSION NUMBER: EMBL / AA893191
  ref <309>: DATABASE ENTRY DATE: 2000-03-03

SEQ ID NO: 14490 - DNA, 255 bp, Rattus norvegicus
  ref <308>: DATABASE ACCESSION NUMBER: EMBL / AA893314
  ref <309>: DATABASE ENTRY DATE: 2000-03-03
ccagtccctccacaattaaaggtgcaaaaggaagcgcttcaggtcttccggaagaagaagtccagtaatcttgtgatgctgccgaatgccaaagcatttccggattctcaaacggcatagctgcatcaaagagaggggcccttctctctgtaagaagatctcaatcacaggactctccagaggcaccagatccacaggacgtttgccatctgcattcttggtttgagcattggctccgaagtccatgagcagatg

SEQ ID NO: 14491 - DNA, 656 bp, Rattus norvegicus
  ref <308>: DATABASE ACCESSION NUMBER: EMBL / AA893495
  ref <309>: DATABASE ENTRY DATE: 2000-03-03
gcaaaaacatcctttaataactgttacctctttctcagtgctcccttctcaagtgactttgtcttgagagtggcaacaagggctactcattgctagttatctaaaagtagattgggttggggagaccctgagaagactggggaaaggcttccatccctcaaagtcagatggcaccaaggcttctcaggacacgttcttaggctggattgaccacttggctcatcatcaggctgctccatgtgaacttgtcaaagagcaggaggatgaagggcttgttgaacttgatgtcaagtggttcagagcgcaggtgtaggggagccccgttggtagaattaggcaacacattcccttcatccagttgtagcatggccttgtggaccatcgttaatgtcaagggaacatctttggtgttgcctgagaaatctgattggttggtgagcaagtccttaatgttcaggtcttccagcacgtctttaaggtcataggtatcagacatggagaatttcgggatgtataggttcacctgccttggggtcataagcttgccccacctatcaattgtgtcccgactaagtgcagcgatgacagtgtccatctggccctggtccggaagaatgaagaaggcagttccatttcccacatagtccatctgtatc

SEQ ID NO: 14492 - protein, 396 aa, Rattus norvegicus
  ref <308>: DATABASE ACCESSION NUMBER: SWISS-Prot / P31211
  ref <309>: DATABASE ENTRY DATE: 2001-10-16
MSLALYTCLLWLCTSGLWTAQASTNESSNSHRGLAPTNVDFAFNLYQRLVALNPDKNTLISPVSISMALAMVSLGSAQTQSLQSLGFNLTETSEAEIHQSFQYLNYLLKQSDTGLEMNMGNAMFLLQKLKLKDSFLADVKQYYESEALAIDFEDWTKASQQITRHVKDKTQGKIEHVFSDLDSPASFILVNYIFLRGIWELPFSPENTREEDFYVNETSTVKVPMMVQSGSIGYFRDSVFPCQLIQMDYVGNGTAFFILPDQGQMDTVIAALSRDTIDRWGKLMTPRQVNLYIPKFSMSDTYDLKDVLEDLNIKDLLTNQSDFSGNTKDVPLTLTMVHKAMLQLDEGNVLPNSTNGAPLHLRSEPLDIKFNKPFILLLFDKFTWSSLMMSQVVNPA

SEQ ID NO: 14493 - DNA, 1422 bp, Homo sapiens
  ref <308>: DATABASE ACCESSION NUMBER: EMBL / J02943
  ref <309>: DATABASE ENTRY DATE: 1999-07-02
cagcctaccgcagactggcctggctatactggacaatgccactcctcctgtacacctgtcttctctggctgcccaccagcggcctctggaccgtccaggccatggatcctaacgctgcttatgtgaacatgagtaaccatcaccggggcctggcttcagccaacgttgactttgccttcagcctgtataagcacctagtggccttgagtcccaaaaagaacattttcatctcccctgtgagcatctccatggccttagctatgctgtccctgggcacctgtggccacacacgggcccagcttctccagggcctgggtttcaacctcactgagaggtctgagactgagatccaccagggtttccagcacctgcaccaactctttgcaaagtcagacaccagcttagaaatgactatgggcaatgccttgtttcttgatggcagcctggagttgctggagtcattctcagcagacatcaagcactactatgagtcagaggtcttggctatgaatttccaggactgggcaacagccagcagacagatcaacagctatgtcaagaataagacacaggggaaaattgtcgacttgttttcagggctggatagcccagccatcctcgtcctggtcaactatatcttcttcaaaggcacatggacacagccctttgacctggcaagcaccagggaggagaacttctatgtggacgagacaactgtggtgaaggtgcccatgatgttgcagtcgagcaccatcagttaccttcatgactcagagctcccctgccagctggtgcagatgaactacgtgggcaatgggactgtcttcttcatccttccggacaaggggaagatgaacacagtcatcgctgcactgagccgggacacgattaacaggtggtccgcaggcctgaccagcagccaggtggacctgtacattccaaaggtcaccatctctggagtctatgaccttggagatgtgctggaggaaatgggcattgcagacttgttcaccaaccaggcaaatttctcacgcatcacccaggacgcccagctgaagtcatcaaaggtggtccataaagctgtgctgcaactcaatgaggagggtgtggacacagctggctccactggggtcaccctaaacctgacgtccaagcctatcatcttgcgtttcaaccagcccttcatcatcatgatcttcgaccacttcacctggagcagccttttcctggcgagggttatgaacccagtgtaagagaccacccacccagagcctcagcactgtctgactttgggaaccagggatcccacagaaatgttttggagagcgggaggtttcccccaatctcctccaagttcttctccctccaaccagagttgtgtctaactttaggcatcttttaataaatgtcattgcgactctg

SEQ ID NO: 14494 - protein, 405 aa, Homo sapiens
  ref <308>: DATABASE ACCESSION NUMBER: PIR / A28321
  ref <309>: DATABASE ENTRY DATE: 1999-07-16
MPLLLYTCLLWLPTSGLWTVQAMDPNAAYVNMSNHHRGLASANVDFAFSLYKHLVALSPKKNIFISPVSISMALAMLSLGTCGHTRAQLLQGLGFNLTERSETEIHQGFQHLHQLFAKSDTSLEMTMGNALFLDGSLELLESFSADIKHYYESEVLAMNFQDWATASRQINSYVKNKTQGKIVDLFSGLDSPAILVLVNYIFFKGTWTQPFDLASTREENFYVDETTVVKVPMMLQSSTISYLHDSELPCQLVQMNYVGNGTVFFILPDKGKMNTVIAALSRDTINRWSAGLTSSQVDLYIPKVTISGVYDLGDVLEEMGIADLFTNQANFSRITQDAQLKSSKVVHKAVLQLNEEGVDTAGSTGVTLNLTSKPIILRFNQPFIIMIFDHFTWSSLFLARVMNPV

SEQ ID NO: 14495 - DNA, 592 bp, Rattus norvegicus
  ref <308>: DATABASE ACCESSION NUMBER: EMBL / AA893592
  ref <309>: DATABASE ENTRY DATE: 2000-03-03
cccgaagacaaccaaagcttccagtacgatcatgaggccttcctaggcaaggaggattccaagaccttcgatcagctaagcccggacgagagcaaggagaggctggggaaaattgttgatcgaatcgacagtgatggagacggccttgttactactgaggagctgaaagtttggatcaaacgggtacagaaaagatacatctacgataatgtggctaaagtctggaaggattatgatagggacaaagacgaaaagatctcctgggaagaatacaagcaggccacctatggctactacctgggaaaccctgctgaattccaagatagctctgatcatcacacctttaaaaagatgctgccacgggatgagaggaggtttaaggcttcagacctcgatggcgacctgacagctactcgggaggagttcactgcctttctgcacccagaggagtttgaacatatgaaggagattgtagttctggaaaccctggaggatatcgacaagaacggggatggttttgtggaccaggatgagtacattgcggacatgttttctcacgaggacaatggccctgagccagactgggttttgt

SEQ ID NO: 14496 - protein, 318 aa, Rattus norvegicus; identical to SEQ ID NO: 8155
  ref <308>: DATABASE ACCESSION NUMBER: SWISS-Prot / Q62703
  ref <309>: DATABASE ENTRY DATE: 2000-05-30

SEQ ID NO: 14497 - DNA, 2104 bp, Homo sapiens
  ref <308>: DATABASE ACCESSION NUMBER: EMBL / D42073
  ref <309>: DATABASE ENTRY DATE: 1999-01-21
gctgttgtcgctcgctcagcgtctccctctcggccgccctctcctcgggacgatggcgcgcggtggccgcggccgccgcctggggttagccctggggctgctgctggcgctggtgctggcgccgcgggttctgcgggccaagcccacggtgcgcaaagagcgcgtggtgcggcccgactcggagctgggcgagcggccccctgaggacaaccagagcttccagtacgaccacgaggccttcctgggcaaggaggactccaagaccttcgaccagctcaccccggacgagagcaaggagaggctagggaagattgttgatcgaatcgacaatgatggggatggctttgtcactactgaggagctgaaaacctggatcaaacgggtgcagaaaagatacatctttgataatgtcgccaaagtctggaaggattatgatagggacaaggatgataaaatttcctgggaagaatacaaacaagccacctatggttactacctaggaaaccccgcagagtttcatgattcttcagatcatcacacctttaaaaagatgctgccacgtgatgagagaagattcaaagctgcagacctcaatggtgacctgacagctactcgggaggagttcactgcctttctgcatcctgaagagtttgaacatatgaaggaaattgtggttttggaaaccctggaggacatcgacaagaacggggatgggtttgtggatcaggatgagtatattgcggatatgttttcccatgaggagaatggccctgagccagactgggttttatcagaacgggagcagtttaacgaattccgggatctgaacaaggacgggaagttagacaaagatgagattcgccactggatcctccctcaagattatgatcacgcacaggctgaggccaggcatctggtatatgaatcagacaaaaacaaggatgagaagctaactaaagaggaaatattggagaactggaacatgtttgttggaagccaagctaccaattacggggaagatctcacaaaaaatcatgatgagctttgatagacactcaccagaatatggcagactgtcataggcattctgttattgtcttggattgttgctacaattgtctaattacagcagttgtgatcccacaaaaagcaagtttatacctcagattggggtataaaaattgtttttcgctcagtatttactggaaaatggacatcactagtctttcagtaagatttctctcaaaacacgtgaaaaccttggtaaattgcaattctttctggggatatattggtacaacatgacttaaaacttttttttttctattaaaacttaaaggggaacaaaacttgaaaaagccctgttcttcagaaggtgagtgggttgagggaggcagtaatatgaagtgactgctgtgtattttaactaccagatttttatatttgccactgttagatagttggaaaggggaaattctgtttaagcgaaagtggtatcatcctaggtaagcttatttcagaacaagtctaatatatcagattctttcttttcgactttatactctgagttattacttactgtaagtggtgtatatgaaacctccatgcattttccagtatggatctgctaatatgcacagtaaatccatgtctttgtttgtttttctattaagaagcaatcaagaaagataatgtgaaaaagaaaggaatttagaggtagggaaaagatgaatgtcagacatgtgaagaactatagtaaaaatgataaaccacctaaatatccttgaacctaccttaaaatgccaatgaggtaggcctgatctttgaatagtggctaggatacaatgcatttcctcagtgatcactgattagaatgagttggtgggatccttgggaagccaaacggagcggggttctggatcatgtcccatccagtccagtgaatccccgacccgcagacctgccccccccgcaacagcttataccatggaatgaggacaaggtgatactctgagctgtggactgaactggcagacacaacctgtacagattgaaatttcaccttgtaaggaggaagtgaatgaaataaaggatccccctaagg

SEQ ID NO: 14498 - protein, 331 aa, Homo sapiens
  ref <308>: DATABASE ACCESSION NUMBER: SWISS-Prot / Q15293
  ref <309>: DATABASE ENTRY DATE: 2002-06-15
MARGGRGRRLGLALGLLLALVLAPRVLRAKPTVRKERVVRPDSELGERPPEDNQSFQYDHEAFLGKEDSKTFDQLTPDESKERLGKIVDRIDNDGDGFVTTEELKTWIKRVQKRYIFDNVAKVWKDYDRDKDDKISWEEYKQATYGYYLGNPAEFHDSSDHHTFKKMLPRDERRFKAADLNGDLTATREEFTAFLHPEEFEHMKEIVVLETLEDIDKNGDGFVDQDEYIADMFSHEENGPEPDWVLSEREQFNEFRDLNKDGKLDKDEIRHWILPQDYDHAQAEARHLVYESDKNKDEKLTKEEILENWNMFVGSQATNYGEDLTKNHDEL

SEQ ID NO: 14499 - DNA, 427 bp, Rattus norvegicus; identical to SEQ ID NO: 13316
  misc_feature (1)..(427): n=a, c, g or t
  ref <308>: DATABASE ACCESSION NUMBER: EMBL / AA893671
  ref <309>: DATABASE ENTRY DATE: 2000-03-03

SEQ ID NO: 14500 - protein, 439 aa, Rattus norvegicus; identical to SEQ ID NO: 13317
  ref <308>: DATABASE ACCESSION NUMBER: SWISS-Prot / Q63244
  ref <309>: DATABASE ENTRY DATE: 1997-11-01

SEQ ID NO: 14501 - DNA, 3421 bp, Homo sapiens; identical to SEQ ID NO: 13318
  ref <308>: DATABASE ACCESSION NUMBER: EMBL / U02310
  ref <309>: DATABASE ENTRY DATE: 2000-03-04

SEQ ID NO: 14502 - protein, 656 aa, Homo sapiens; identical to SEQ ID NO: 13319
  misc_feature (1)..(656): Xaa=Unknown amino acid

SEQ ID NO: 14503 - DNA, 402 bp, Rattus norvegicus
  ref <308>: DATABASE ACCESSION NUMBER: EMBL / AA893825
  ref <309>: DATABASE ENTRY DATE: 1999-01-28
agcaatcagaaatgtcttgatttatttccaaggagtgaaggtttcttggaaactgggctccataacttgcaaatacagaatcatgtgatcaatatccaacaagagccgggatccccaggaggcacgatagcatgggaggctgctgttctgaagacagtgatgattccagaagctaggaaactcagaagatgagtcatgctcttgaaagtatggtagcaccatgaaattctggtgagaattcaagagtaacggtgatagcctttattgtcttggggcctccaggatatctataacaaaaattggagttatgtccatgaatttctgattgcttgtttcaagtatcttgctagtccctggaggtgtcactgaagagcctggaaccatgtttgtcgttgctttgct

SEQ ID NO: 14504 - DNA, 1700 bp, Rattus norvegicus
  ref <308>: DATABASE ACCESSION NUMBER: EMBL / AJ006341
  ref <309>: DATABASE ENTRY DATE: 1999-01-08
aattcggatccaacactctgaggcgcctgagtgaaaagtgtggcaccatggcctctgtgctgtcctacgaaagtctggtacacgccgtggccggagccgtgggaagtgtgactgccatgacagtgttcttccccttggatactgctagacttcggcttcaggtcgatgagaaaagaaagtcaaaaacgacgcatgcagtgctcctggagataattaaggaagaaggcctcctggcaccataccgaggatggtttccagttatttccagtctctgctgctccaattttgtctatttttacacttttaatagcctcaaagcagtgtgggtcaaaggtcagcgttcttctacaggaaaagatctcgtggttgggtttgtagcaggagtggtgaatgtgctgctgacgactccgctctgggtggtaaacaccagactgaagctgcagggggcaaaatttcggaatgaagacattataccaactaactacaaaggcattatcgatgcattccaccagattattcgagatgaagggatcttggctctgtggaatggcaccttcccctccttgctgttggtcttcaaccctgccatccaattcatgttctatgaaggcttaaaacggcagcttctaaagaaacggatgaagctctcttctctggatgtgttcatcattggcgcaatagccaaagcgattgccaccacagtcacctatcccatgcagacggtacagtcaattctgaggtttggacgtcatagactgaacccagaaaacaggaccctgggaagtcttcggaatgttctctctcttcttcaccagcgagtcaagcgctttggaataatgggactctacaaaggcctggaagctaagctgctgcagacagtgctcacagccgccctcatgttccttgtgtacgagaaactgacagctgctaccttcaccgtaatgggcttgaagagcacacataagcactgaggcccgcccacaggacagtgtggagacgcaggtgctgcacagggagaagaggaacagttctcctttcccgttggtcccatccacaccacagacattccagtcattggctgtaaaggcatcaaaggctaagcagggagtatagccagctaagcctgtcacctttatggggttttttggtgtttttatggtgtttggttgtatttgggggtagaggttagactgatatgaaaatattgaaaccctgaaaatgttagtttgtgggtgttcattcatttttctcaagggggtggactttccattgaaagcttttctcaactttgccacttgttttcttttgctaaattctctcccaggttctagacgattcagtaccataattctcctcagatgcttttgtcttaatcttggtaaagagttcctctgagaataacatcatgactgtgccatgggcatgactttgtttccatctgactcttttcctcctgctttaagaaagctatttattttgtgggggaaatgaaaattactaacctaaatgattttcttaaaatttgtaaatgtcaattattcattggtgtttgacataggttttttttaatacatatttatttcgaattgttttatattacaaaaaaaagccttgatgttgtatgtccattcgtgcaagctccaatcacataagccttaataaattgtcagcacacatacaaaaaaaaaaaaaaaaaaaaa

SEQ ID NO: 14505 - protein, 307 aa, Rattus norvegicus
  ref <308>: DATABASE ACCESSION NUMBER: SWISS-Prot / CAA06984
  ref <309>: DATABASE ENTRY DATE: 2001-10-16
MASVLSYESLVHAVAGAVGSVTAMTVFFPLDTARLRLQVDEKRKSKTTHAVLLEIIKEEGLLAPYRGWFPVISSLCCSNFVYFYTFNSLKAVWVKGQRSSTGKDLVVGFVAGVVNVLLTTPLWVVNTRLKLQGAKFRNEDIIPTNYKGIIDAFHQIIRDEGILALWNGTFPSLLLVFNPAIQFMFYEGLKRQLLKKRMKLSSLDVFIIGAIAKAIATTVTYPMQTVQSILRFGRHRLNPENRTLGSLRNVLSLLHQRVKRFGIMGLYKGLEAKLLQTVLTAALMFLVYEKLTAATFTVMGLKSTHKH

SEQ ID NO: 14506 - DNA, 1838 bp, Homo sapiens
  ref <308>: DATABASE ACCESSION NUMBER: Refseq / NM_006358
  ref <309>: DATABASE ENTRY DATE: 2002-11-05
gcgggtttgagagggcggggattgcgactctcacaccctgagctccggtgctcctttcctaactccactggctgcggcatctgtgggaaaagtgtggctgggtcttcgaggagccgaaccaatggcttccgtgctgtcctacgaaagcctggtccacgccgtggccggagccgtgggaagcgtgacagcaatgacagtgttttttcccctggatacagctagacttcgacttcaggttgatgagaaaagaaaatccaaaactacacacatggtgctcctggagatcattaaagaagaaggactcctggcaccatatcgagggtggtttccagtgatttccagtctctgctgctccaattttgtctatttctacacttttaatagcctcaaagcactctgggtcaaaggtcaacattctaccactggaaaagatctcgtagttgggtttgttgcaggagtggttaatgtgttgctaacaactccactctgggtggtaaacaccagactgaagcttcaaggagcaaaatttaggaatgaagacattgtaccaacaaactacaaaggtatcattgatgcttttcatcagatcattcgcgatgaaggaatctcggctttatggaatggcacatttccctcattgctgttggtcttcaatcctgccatccagttcatgttttatgaaggtttaaaacggcagcttttaaagaaacggatgaagctttcttccttggatgtgttcatcattggtgcagtagccaaagcgattgccaccacggtgacctatcccctgcagacggtacagtcaattctgaggtttgggcgtcatagactaaacccagaaaacagaacattgggaagtcttcggaatattctctatcttcttcaccaacgagtaagacgttttggaataatgggactctacaaaggccttgaagccaaactgctgcagacagtcctcactgctgctctcatgttccttgtttatgagaaactgacagctgccaccttcacagttatggggctgaagcgtgcacaccaacactgagacgccttcccatgaaaaattccgaagatgctcaagagggaggtttcctcctgagtgaagagaagtgattctcccttgactctggctcctgcaccacaaatgttaccctcattggcttgaaaagcatccaagggtgcacagggagtatggccaactggacctgttgtcaccttaattgtcatgctggctggttggattttggggtggcagttggactaatgtgaaaaaaacattgctgaaaacctaaaaatgaaagtttgtgagtgtttattggttttcttaagagaaatggactattttgctctcatgtgtaatgttttctatttaaatctttcttaaatataccagctgttctctttccctgaactctcccccaggttctaggacaaatttaataacatgtaattctgctcaaatacttttgtatgtctcagtgttggtgttttcctccctaaaactaacattagggcttgtccacgggcatgactttatttttgttgggcttttttttccctgcttaaggagaggtgtcttttttggatatgagctatttattttgtgaaatgaaaattgttcacccaaatgattctcttataaactatttgtaaatgtcacttattcattagtgtttgacataatttttagaatatttattttgaatcaatcctttcattacgaaagacttgaagttttgtgtccattcttacaagccctggtcagtcaagtcccaataaatggtcagcacaaaaaaaaaaaaaaaaaaaaaaaaaaaaaaaaaaaaaaaaaaaaaaaa

SEQ ID NO: 14507 - protein, 307 aa, Homo sapiens
  ref <308>: DATABASE ACCESSION NUMBER: Refseq / NP_006349
  ref <309>: DATABASE ENTRY DATE: 2002-11-05
MASVLSYESLVHAVAGAVGSVTAMTVFFPLDTARLRLQVDEKRKSKTTHMVLLEIIKEEGLLAPYRGWFPVISSLCCSNFVYFYTFNSLKALWVKGQHSTTGKDLVVGFVAGVVNVLLTTPLWVVNTRLKLQGAKFRNEDIVPTNYKGIIDAFHQIIRDEGISALWNGTFPSLLLVFNPAIQFMFYEGLKRQLLKKRMKLSSLDVFIIGAVAKAIATTVTYPLQTVQSILRFGRHRLNPENRTLGSLRNILYLLHQRVRRFGIMGLYKGLEAKLLQTVLTAALMFLVYEKLTAATFTVMGLKRAHQH

SEQ ID NO: 14508 - DNA, 397 bp, Rattus norvegicus
  ref <308>: DATABASE ACCESSION NUMBER: EMBL / AA894337
  ref <309>: DATABASE ENTRY DATE: 2000-03-03
agctggggacagaacccagggccttgtgcttgctaggcaagcgctctaccactgagctaaatccccaaccccttattgttttttaagagaaagtgagtacaggaagttgggtgaataggcaggtggggaggatttgagggcagttgggagaaaggaaaaatatgaccaagatatattgtatgcaattctcaaaggataaacaaaacatctaaatatgaaaagtaaaaatcttaaattctgtaaaaatgtttaaaaataataaacagacaaacaatcaaacaaacaaatgcagccataagttggtgagatggttcagcaggtaaaaacactcctgccaagtccggcaacctgacttcagtcccttagactcacagtggagtagagagtatcaactctc

SEQ ID NO: 14509 - DNA, 2495 bp, Rattus norvegicus
  ref <308>: DATABASE ACCESSION NUMBER: Refseq / NM_012520
  ref <309>: DATABASE ENTRY DATE: 2002-11-05
attgcctaccccgggtggagaccgtgctcgtccggccctcttgcctcacgttctgcagctctgcagctccgcaatcctacaccatggcggacagccgggacccagccagcgaccagatgaagcagtggaaggagcagcgggcccctcagaaacccgatgtcctgaccaccggaggcgggaacccaataggagataaacttaatatcatgactgcggggccccgagggcccctcctcgttcaagatgtggttttcaccgacgagatggcacactttgacagagagcggattcctgagagagtggtacatgcaaagggagcaggtgcttttggatactttgaggtcacccacgatattaccagatactccaaggcaaaggtgtttgagcatattgggaagaggactcctattgccgtccgattctccacagtcgctggagagtcaggctcagctgacacagttcgtgaccctcgtgggtttgcagtgaaattctacactgaagatggtaactgggacctcgtgggaaacaacacccctattttcttcatcagggatgccatgttgtttccatcctttatccatagccagaagagaaacccacaaactcacctgaaggaccctgacatggtctgggacttctggagtctttgtccagagtctctccatcaggttactttcttgttcagcgaccgagggattccagatggacatcggcacatgaatggctatggctcacacaccttcaagctggttaatgcgaatggagaggcagtgtactgcaagttccattacaagactgaccagggcatcaaaaacttgcctgttgaagaggcaggaagacttgcacaggaagacccggattatggcctccgagatcttttcaatgccatcgccagtggcaattacccatcctggactttttacatccaggtcatgactttcaaggaggcagaaaccttcccatttaatccatttgacctgaccaaggtttggcctcacaaggactaccctcttataccagttggcaaactggtcttaaacagaaatcctgctaattattttgctgaagttgaacagatggcttttgacccaagcaacatgccccctggcattgagcccagcccggacaagatgctccagggccgcctttttgcttacccagacactcaccgccaccgcctgggaccaaactatctgcagatacctgtgaactgtccctaccgtgctcgcgtggccaactaccagcgcgatggccccatgtgcatgcatgacaaccagggtggtgctcccaactactaccccaacagcttcagcgcaccagagcagcagggctcggccctggagcaccatagccagtgctctgcagatgtgaagcgcttcaacagtgctaatgaagacaacgtcactcaggtgcggacattctatacgaaggtgttgaatgaggaggagaggaaacgcctgtgtgagaacattgccaaccacctgaaagatgctcagcttttcattcagaggaaagcggtcaagaatttcactgacgtccaccctgactacggggcccgagtccaggctcttctggaccagtacaactcccagaagcctaagaatgcaattcacacctacgtacaggccggctctcacatagctgccaagggaaaagctaacctgtaaagcacgggtgctcagcctcctcagcctgcactgaggagatccctcatgaagcagggcacaagcctcaccagtaatcatcgctggatggagtctcccctgctgaagcgcagactcacgctgacgtctttaaaacgataatccaagcttctagagtgaatgatagccatgcttttgatgacatttcccgagggggaaattaaagattagggcttagcaatcacttaacagaaacatggatctgcttaggacttctgtttggattattcatttaaaatgattacaagaaaggttttctagccagaaacatgatttgattagatatgatatatgataaaatcttggtgattttactatagtcttatgttacctcacagcctggtatatatacaacacacacacacacacacacacacacacaccaaaacacacatacactatacacacacacacacacacacactaaaacacacatacacaacacacacatacactacacacacagaacacacaacacaaacatacacacataggcacacacacacacacacacacacacacacacacacacacacacacacatgaatgaagggattataaagatggcccacccagaatttttttttatttttctaaggtccttataagaaaaaccatacttggatcatgtcttccaaaaataactttagcactgttgaaacttaatgtttattcctgtgtagttgattggattccttttccccttgaaattatgtttatgctgatacacagtgatttcacatagggtgatttgtatttgcttacatttttacaataaaatgatcttcatgg

SEQ ID NO: 14510 - protein, 527 aa, Rattus norvegicus; identical to SEQ ID NO: 13335
  ref <308>: DATABASE ACCESSION NUMBER: Refseq / NP_036652
  ref <309>: DATABASE ENTRY DATE: 2002-11-05

SEQ ID NO: 14511 - DNA, 2279 bp, Homo sapiens; identical to SEQ ID NO: 13336
  ref <308>: DATABASE ACCESSION NUMBER: Refseq / NM_001752
  ref <309>: DATABASE ENTRY DATE: 2000-10-31

SEQ ID NO: 14512 - protein, 527 aa, Homo sapiens; identical to SEQ ID NO: 13337
  ref <308>: DATABASE ACCESSION NUMBER: Refseq / NP_001743
  ref <309>: DATABASE ENTRY DATE: 2000-10-31

SEQ ID NO: 14513 - DNA, 1719 bp, Rattus norvegicus
  ref <308>: DATABASE ACCESSION NUMBER: Refseq / NM_031510
  ref <309>: DATABASE ENTRY DATE: 2002-11-14
cgggtgtgagcggggttattgaagtaaaaatgtccagaaaaatccatggcggttctgtggtggaaatgcaaggagatgaaatgacacggatcatctgggaattgattaaagaaaagctcattcttccctacgtggaactggatctgcatagctatgacttaggcatagagaatcgggatgccaccaatgaccaggtcaccaaggatgctgcggaggctataaagaaatacaacgtcggcgtcaagtgtgctaccatcacccccgatgagaagagggttgaggagttcaagttgaaacaaatgtggaaatcacccaacggtaccatccggaacattctgggcggcactgtcttcagagaagctattatctgcaaaaatatcccccggctagtgacaggctgggtaaaacccatcatcattggccgacacgcctatggggaccaatacagagcaacagatttcgttgttcctgggcctggaaaagtagagataacctacacaccaaaagatgggtcgcagaaagtgacatacctggtgcatgactttgaagaaggtggtggtgttgccatgggtatgtacaaccaggataagtcaattgaagattttgcacacagttccttccaaatggctctgtcgaagggctggcctttgtatctaagcaccaagaacactattctgaagaagtatgatggacgcttcaaagacatcttccaggagatctatgacaagcaatacaagtccaagtttgaagctcagaagatctggtatgaacacaggctcatagatgacatggtggcccaggctatgaaatcagaaggaggcttcatctgggcctgtaagaactatgatggtgatgtgcagtcagactcagtagcccaaggttatggctcccttggcatgatgaccagtgtgctgatttgtccagatggtaagacggtagaagcagaggctgcccatggcactgtcacacgtcactaccgcatgtaccagaaaggacaggagacgtccaccaatcccattgcttccatttttgcctggtcccgagggttagcccacagagcaaagcttgacaacaatactgagctcagcttctttgcaaatgctttggaagaagtctgcattgagaccattgaggctggctttatgactaaggacttggctgcttgcattaaaggcttacccaatgtacagcgttctgactacttgaatacatttgagtttatggacaaacttggagaaaacttgaaggccaaactagctcaggccaaactttaaggtcaaacctgggcttagggcaaatctttgtggtaactaagtccacagtttacatatttcctttttgttttaataacactcaaggttaaaaacaagaatcattttgtaatttgtttagaagacgaagttgaacttttctatatgtttacagcctattttctttttcatacagttattgccaccttaatgaatgtggtggggaaggtttttttaattgtattttactgtgtaatagcagtctaggaattgtgttagtatctgttcacaattaactgtcactttttatttgctctaatgtaaatgaccaaaatcagaaatgctccaagggtgaacaatcactacactatgtttccccgtaaaggtgaaggagaggctcacctcccctactgtccatgagtgtgaacacagggagcaaaagtgtgcaaatgttgcactgtgtgtggaa

SEQ ID NO: 14514 - protein, 414 aa, Rattus norvegicus
  ref <308>: DATABASE ACCESSION NUMBER: Refseq / NP_113698
  ref <309>: DATABASE ENTRY DATE: 2002-11-14
MSRKIHGGSVVEMQGDEMTRIIWELIKEKLILPYVELDLHSYDLGIENRDATNDQVTKDAAEAIKKYNVGVKCATITPDEKRVEEFKLKQMWKSPNGTIRNILGGTVFREAIICKNIPRLVTGWVKPIIIGRHAYGDQYRATDFVVPGPGKVEITYTPKDGSQKVTYLVHDFEEGGGVAMGMYNQDKSIEDFAHSSFQMALSKGWPLYLSTKNTILKKYDGRFKDIFQEIYDKQYKSKFEAQKIWYEHRLIDDMVAQAMKSEGGFIWACKNYDGDVQSDSVAQGYGSLGMMTSVLICPDGKTVEAEAAHGTVTRHYRMYQKGQETSTNPIASIFAWSRGLAHRAKLDNNTELSFFANALEEVCIETIEAGFMTKDLAACIKGLPNVQRSDYLNTFEFMDKLGENLKAKLAQAKL

SEQ ID NO: 14515 - DNA, 2359 bp, Homo sapiens
  ref <308>: DATABASE ACCESSION NUMBER: Refseq / XM_028869
  ref <309>: DATABASE ENTRY DATE: 2002-08-01
aaagccgggaagaggaaaagctcggacctaccctgtggtcccgggtttctgcagagtctacttcagaagcggaggcactgggagtccggtttgggattgccaggctgtggttgtgagtctgagcttgtgagcggctgtggcgccccaactcttcgccagcatatcatcccggcaggcgataaactacattcagttgagtctgcaagactgggaggaactggggtgataagaaatctattcactgtcaaggtttattgaagtcaaaatgtccaaaaaaatcagtggcggttctgtggtagagatgcaaggagatgaaatgacacgaatcatttgggaattgattaaagagaaactcatttttccctacgtggaattggatctacatagctatgatttaggcatagagaatcgtgatgccaccaacgaccaagtcaccaaggatgctgcagaagctataaagaagcataatgttggcgtcaaatgtgccactatcactcctgatgagaagagggttgaggagttcaagttgaaacaaatgtggaaatcaccaaatggcaccatacgaaatattctgggtggcacggtcttcagagaagccattatctgcaaaaatatcccccggcttgtgagtggatgggtaaaacctatcatcataggtcgtcatgcttatggggatcaatacagagcaactgattttgttgttcctgggcctggaaaagtagagataacctacacaccaagtgacggaacccaaaaggtgacatacctggtacataactttgaagaaggtggtggtgttgccatggggatgtataatcaagataagtcaattgaagattttgcacacagttccttccaaatggctctgtctaagggttggcctttgtatctgagcaccaaaaacactattctgaagaaatatgatgggcgttttaaagacatctttcaggagatatatgacaagcagtacaagtcccagtttgaagctcaaaagatctggtatgagcataggctcatcgacgacatggtggcccaagctatgaaatcagagggaggcttcatctgggcctgtaaaaactatgatggtgacgtgcagtcggactctgtggcccaagggtatggctctctcggcatgatgaccagcgtgctggtttgtccagatggcaagacagtagaagcagaggctgcccacgggactgtaacccgtcactaccgcatgtaccagaaaggacaggagacgtccaccaatcccattgcttccatttttgcctggaccagagggttagcccacagagcaaagcttgataacaataaagagcttgccttctttgcaaatgctttggaagaagtctctattgagacaattgaggctggcttcatgaccaaggacttggctgcttgcattaaaggtttacccaatgtgcaacgttctgactacttgaatacatttgagttcatggataaacttggagaaaacttgaagatcaaactagctcaggccaaactttaagttcatacctgagctaagaaggataattgtcttttggtaactaggtctacaggtttacatttttctgtgttacactcaaggataaaggcaaaatcaattttgtaatttgtttagaagccagagtttatcttttctataagtttacagcctttttcttatatatacagttattgccacctttgtgaacatggcaagggacttttttacaatttttattttattttctagtaccagcctaggaattcggttagtactcatttgtattcactgtcactttttctcatgttctaattataaatgaccaaaatcaagattgctcaaaagggtaaatgatagccacagtattgctccctaaaatatgcataaagtagaaattcactgccttcccctcctgtccatgaccttgggcacagggaagttctggtgtcatagatatcccgttttgtgaggtagagctgtgcattaaacttgcacatgactggaacgaagtaggagtgcaactcaaatgtgttgaagatactgcagtcatttttgtaaagaccttgctgaatgtttccaatagactaaatactgtttaggccgcaggagagtttggaatccggaataaatactacctggaggtttgtcctctccatttttctctttctcctcctggcctggcctgaatattatactactctaaatagcatatttcatccaagtgcaataatgtaagctgaatcttttttggacttctgctggcctgttttatttcttttatataaatgtgatttctcagaaattgatattaaacactatcttatcttctcctgaactgttgattttaattaaaattaagtgctaattacc

SEQ ID NO: 14516 - protein, 414 aa, Homo sapiens
  ref <308>: DATABASE ACCESSION NUMBER: Refseq / XP_028869
  ref <309>: DATABASE ENTRY DATE: 2002-08-01
MSKKISGGSVVEMQGDEMTRIIWELIKEKLIFPYVELDLHSYDLGIENRDATNDQVTKDAAEAIKKHNVGVKCATITPDEKRVEEFKLKQMWKSPNGTIRNILGGTVFREAIICKNIPRLVSGWVKPIIIGRHAYGDQYRATDFVVPGPGKVEITYTPSDGTQKVTYLVHNFEEGGGVAMGMYNQDKSIEDFAHSSFQMALSKGWPLYLSTKNTILKKYDGRFKDIFQEIYDKQYKSQFEAQKIWYEHRLIDDMVAQAMKSEGGFIWACKNYDGDVQSDSVAQGYGSLGMMTSVLVCPDGKTVEAEAAHGTVTRHYRMYQKGQETSTNPIASIFAWTRGLAHRAKLDNNKELAFFANALEEVSIETIEAGFMTKDLAACIKGLPNVQRSDYLNTFEFMDKLGENLKIKLAQAKL

SEQ ID NO: 14517 - DNA, 967 bp, Rattus norvegicus
  ref <308>: DATABASE ACCESSION NUMBER: Refseq / NM_022537
  ref <309>: DATABASE ENTRY DATE: 2000-12-20
tataactccagtaagcagatctccagagacagaactcatcctgatttggaagtcttcagcaatggagctgccattgagtcaacattccttctgcaaactcctgctcctggtggtatcaagcttgctgttgtgggaaaaagctgcatcaattcctgcatgtcttgcggaagagggcggctgctggaacccccttgtggaaacatttaacagtgccatccataaagctgagacgctctatgaccttgctaatcagatacatgtagagctctaccaaaacaaattctcatctgaacagttttcatctcttaattcacaagtgattaggaaagacaagactgctctcagagctggaagttactgccattcaactctcataaacaccccaaataaggaaaatgaacatataaatattgaaatcaaagagtatgtaaaaactttgatcaattttgtgggtgcctggatcagccctctataccatctagtgcttgaattgagtgccatgcaagatgtcccagaatctatcctctctaaagccaaggaaattgaagagaacaacagacaactcctggatgaccttaagtggatactcatcaaggtctctcctacagaagagatgaaggaagaatttcccagctggggacacctttctttcttaaaatcaagtggcgaaaaatctaagtttttggcaatgtttaatctttcaaactgtctaggctatgatgcaaagtacactctattaaatctcaggatattaaaatgtctcacaactgggaaagattgctaagtgcacatttaccatgtatgctttggagatgctctatgacagttcattcctgtattgtaaattgtatacttttcaaatgcatatgtgggtatagtgtgactcctttaaaaaaattccctttggaaatgcccaaatctaaaaagtctttccttcttttattcattgaataaaatatataccaat

SEQ ID NO: 14518 - protein, 240 aa, Rattus norvegicus
  ref <308>: DATABASE ACCESSION NUMBER: Refseq / NP_071982
  ref <309>: DATABASE ENTRY DATE: 2000-12-20
MELPLSQHSFCKLLLLVVSSLLLWEKAASIPACLAEEGGCWNPLVETFNSAIHKAETLYDLANQIHVELYQNKFSSEQFSSLNSQVIRKDKTALRAGSYCHSTLINTPNKENEHINIEIKEYVKTLINFVGAWISPLYHLVLELSAMQDVPESILSKAKEIEENNRQLLDDLKWILIKVSPTEEMKEEFPSWGHLSFLKSSGEKSKFLAMFNLSNCLGYDAKYTLLNLRILKCLTTGKDC

SEQ ID NO: 14519 - DNA, 970 bp, Homo sapiens
  ref <308>: DATABASE ACCESSION NUMBER: EMBL / X54393
  ref <309>: DATABASE ENTRY DATE: 1994-08-12
ccctcaaagacagagacaccaagaagaatcggaacatacaggctttgatatcaaaggtttataaagccaatatctgggaaagagaaaaccgtgacttccagatcttctctggtgaagtgtgtttcctgcaacgatcacgaacatgaacatcaaaggatcgccatgaaagggtccctcctgctgctgctggtgtcaaacctgctcctgtgccagagcgtggcccccttgcccatctgtcccggcggggctgcccgatgccaggtgacccttcgagacctgtttgaccgcgccgtcgtcctgtcccactacatccataacctctcctcagaaatgttcagcgaattcgataaacggtatacccatggccgggggttcattaccaaggccatcaacagctgccacacttcttcccttgccacccccgaagacaaggagcaagcccaacagatgaatcaaaaagactttctgagcctgatagtcagcatattgcgatcctggaatgagcctctgtatcatctggtcacggaagtacgtggtatgcaagaagccccggaggctatcctatccaaagctgtagagattgaggagcaaaccaaacggcttctagagggcatggagctgatagtcagccaggttcatcctgaaaccaaagaaaatgagatctaccctgtctggtcgggacttccatccctgcagatggctgatgaagagtctcgcctttctgcttattataacctgctccactgcctacgcagggattcacataaaatcgacaattatctcaagctcctgaagtgccgaatcatccacaacaacaactgctaagcccacatccatttcatctatttctgagaaggtccttaatgatccgttccattgcaagcttcttttagttgtatctcttttgaatccatgcttgggtgtaacaggtctcctcttaaaaaataaaaactgactccttagagacatc

SEQ ID NO: 14520 - protein, 227 aa, Homo sapiens
  ref <308>: DATABASE ACCESSION NUMBER: SWISS-Prot / CAA38264
  ref <309>: DATABASE ENTRY DATE: 2002-06-15
MNIKGSPWKGSLLLLLVSNLLLCQSVAPLPICPGGAARCQVTLRDLFDRAVVLSHYIHNLSSEMFSEFDKRYTHGRGFITKAINSCHTSSLATPEDKEQAQQMNQKDFLSLIVSILRSWNEPLYHLVTEVRGMQEAPEAILSKAVEIEEQTKRLLEGMELIVSQVHPETKENEIYPVWSGLPSLQMADEESRLSAYYNLLHCLRRDSHKIDNYLKLLKCRIIHNNNC

SEQ ID NO: 14521 - DNA, 1854 bp, Rattus norvegicus; identical to SEQ ID NO: 8845
  ref <308>: DATABASE ACCESSION NUMBER: Refseq / NM_024147
  ref <309>: DATABASE ENTRY DATE: 2002-11-05

SEQ ID NO: 14522 - protein, 393 aa, Rattus norvegicus; identical to SEQ ID NO: 8846
  ref <308>: DATABASE ACCESSION NUMBER: Refseq / NP_077061
  ref <309>: DATABASE ENTRY DATE: 2002-11-05

SEQ ID NO: 14523 - DNA, 1833 bp, Homo sapiens
  ref <308>: DATABASE ACCESSION NUMBER: Refseq / NM_016337
  ref <309>: DATABASE ENTRY DATE: 2001-12-10
ggcacgagtgggagtacaggactcgcctcctcagggttccctgtgctgccacttttcagccatggccacaagtgaacagagtatctgccaagcccgggcttccgtgatggtctacgatgacaccagtaagaaatgggtaccaatcaaacctggccagcagggattcagccggatcaacatctaccacaacactgccagcaacaccttcagagtcgttggagtcaagttgcaggatcagcaggttgtgatcaattattcaatcgtgaaagggctgaagtacaatcaggccacgccaaccttccaccagtggcgagatgcccgccaggtctacggcttaaactttgcaagtaaagaagaggcaaccacgttctccaatgcaatgctgtttgccctgaacatcatgaattcccaagaaggaggcccctccagccagcgtcaggtgcagaatggcccctctcctgatgagatggacatccagagaagacaagtgatggagcagcaccagcagcagcgtcaggaatctctagaaagaagaacctcggccacagggcccatcctcccaccaggacatccttcatctgcagccagcgcccccgtctcatgtagtgggcctccaccgccccccccacccccagtcccacctccacccactggggctaccccacctcccccacccccactgccagccggaggagcccaggggtccagccacgacgagagctccatgtcaggactggccgctgccatagctggggccaagctgagaagagtccaacggccagaagacgcatctggaggctccagtcccagtgggacctcaaagtccgatgccaaccgggcaagcagcgggggtggcggaggaggcctcatggaggaaatgaacaaactgctggccaagaggagaaaagcagcctcccagtcagacaagccagccgagaagaaggaagatgaaagccaaatggaagatcctagtacctccccctctccggggacccgagcagccagccagccacctaactcctcagaggctggccggaagccctgggagcggagcaactcggtggagaagcctgtgtcctcgattctgtccagaaccccgtctgtggcaaagagccccgaagctaagagcccccttcagtcgcagcctcactctaggatgaagcctgctgggagcgtgaatgacatggccctggatgccttcgacttggaccggatgaagcaggagatcctagaggaggtggtgagagagctccacaaggtgaaggaggagatcatcgacgccatcaggcaggagctgagtgggatcagcaccacgtaaggggccggcctcgctgcgctgattcgtcgagcccatccggcgacagaggacagccagaagcccagccagccccagactccagtgcaccagagcacgcacaggagcctgggcgcgctgctgtgaaacgtcctgacctgtgatcacacatgacagtgaggaaaccaagtgcaactcctgggtttttttagattctgcctgacacggaacaccaggtctgctcgtcttttttgtgttttatatttgcttatttaaggtacatttctttgggtttctagagacgcccctaagtcacctgcttcattagacggtttccaggttttctcccaggtgacgctgttagcgcctcagctggcggtgacagccggcccagcgtggcgccaccacacaccgcagagctgtccaggcacagctccgtccccagcgctcatggtgttgaaactgtctgtcatgcaccacggtgtctgtgtccacacagtaataaacggtttactgtccgcaaaaaaaaaaaaaaaaaa

SEQ ID NO: 14524 - protein, 418 aa, Homo sapiens; identical to SEQ ID NO: 8848
  ref <308>: DATABASE ACCESSION NUMBER: Refseq / NP_057421
  ref <309>: DATABASE ENTRY DATE: 2001-12-10

SEQ ID NO: 14525 - DNA, 501 bp, Rattus norvegicus
  ref <308>: DATABASE ACCESSION NUMBER: EMBL / AI008741
  ref <309>: DATABASE ENTRY DATE: 2000-03-03
accaaatgaaatgccaaaggaaaatcgaaaagccactggctatgctgtgttttgatataattgtactgtgtttttaaattttgtacctaatttttaaaaacaaaatttcacaccatagtatatattttacttctggcaaaatacacttgttcttttatatacatatatatataataaaataggttctaaaaaaaaaatccgtactataagaaattaacctgcccaaaatgtgaaacgtggttgactgatgttcgtgaaagaataaaatgtttctcttttttctctacattttataattgaatagttatttctgtgaaaaaaatgtaaactttcaataatctaacattttatttcttttagaaagggccaagataccggtcaacttttaggtaaaaatacatactcacgtgtgtacaagagccaatcattaaagttgaggccgaaagggtggaaaagtgcaatttttgaaaacattttttttttcaaaagggaaatgctagt

SEQ ID NO: 14526 - protein, 552 aa, Rattus norvegicus
  ref <308>: DATABASE ACCESSION NUMBER: SWISS-Prot / O35776
  ref <309>: DATABASE ENTRY DATE: 2002-06-15
MHCERFLCVLRIIGTTLFGVSLLLGITAAYIVGYQFIQTDNYYFSFGLYGAFLASHLIIQSLFAFLEHRKMKKSLETPIKLNKTVALCIAAYQEDPDYLRKCLQSVKRLTYPGIKVVMVIDGNSDDDLYMMDIFSEVMGRDKSVTYIWKNNFHERGPGETEESHKESSQHVTQLVLSNKSICIMQKWGGKREVMYTAFRALGRSVDYVQVCDSDTMLDPASSVEMVKVLEEDPMVGGVGGDVQILNKYDSWISFLSSVRYWMAFNIERACQSYFGCVQCISGPLGMYRNSLLHEFVEDWYNQEFMGNQCSFGDDRHLTNRVLSLGYATKYTARSKCLTETPIEYLRWLNQQTRWSKSYFREWLYNAMWFHKHHLWMTYEAVITGFFPFFLIATVIQLFYRGKIWNILLFLLTVQLVGLIKSSFASCLRGNIVMVFMSLYSVLYMSSLLPAKMFAIATINKAGWGTSGRKTIVVNFIGLIPVSVWFTILLGGVIFTIYKESKKPFSESKQTVLIVGTLIYACYWVVLLTLYVVLINKCGRRKKGQQYDMVLDV

SEQ ID NO: 14527 - DNA, 3003 bp, Homo sapiens
  ref <308>: DATABASE ACCESSION NUMBER: EMBL / U54804
  ref <309>: DATABASE ENTRY DATE: 1999-07-01
cgaagtcaagacgtctggaaagaattacccagtcctggcttcgagcagcccattgaaccagagacttgaaacagccccagccaaagacttttctcccaattctgcgcttcctgggttctgctgagtcttccacaggctttttttttttttttttttttttaagacgaaaaagagattttctgttatcgggggcagaaagactgaagcacaaaaaaaaaaaaaaagaaaagaaaagaaaagaaaaaagaaaagttaatttatttttaaagcataatttttttaagaattagactgaagtgcaacggaaacataaagagaatattagtgaaattattttttaaagtggggaagaatcaaacatttaagactcccctatcctttttaaatgttgtttttaaatttcttattttttttggccggtcgtctcaaattcatctgatctcttattacctcaattttggaaactgcccgccaccgaccctccgggaccacacagacaggctgaggacgactttatgaccaagagctgaacaagatgcattgtgagaggtttctatgtatcctgagaataattggaaccacactctttggagtctctctcctccttggaatcacagctgcttatattgttggctaccagtttatccaaacggataattactatttctcttttggactgtatggtgcctttttggcatcacacctcatcatccaaagcctgtttgcctttttggagcaccgaaaaatgaaaaaatccctagaaacccccataaagttgaacaaaacagttgccctttgcatcgctgcctatcaagaagatccagactacttaaggaaatgtttgcaatctgtgaaaaggctaacctaccctgggattaaagttgtcatggtcatagatgggaactcagaagatgacctttacatgatggacatcttcagtgaagtcatgggcagagacaaatcagccacttatatctggaagaacaacttccacgaaaagggtcccggtgagacagatgagtcacataaagaaagctcgcaacacgtaacgcaattggtcttgtccaacaaaagtatctgcatcatgcaaaaatggggtggaaaaagagaagtcatgtacacagccttcagagcactgggacgaagtgtggattatgtacaggtttgtgattcagacactatgcttgacccagcctcatctgtggagatggtaaaagttttagaagaagatcccatggttggaggtgttgggggagatgtccagattttaaacaagtacgattcctggatctcattcctcagcagtgtaagatattggatggcttttaatatagaaagggcctgtcagtcttattttgggtgtgttcagtgcattagtggacctctgggaatgtacagaaactccttgttgcatgagtttgtggaagattggtacaatcaagaatttatgggcaaccaatgtagctttggtgatgacaggcatctcacgaaccgggtgctgagcctgggctatgcaacaaaatacacagctcgatctaagtgccttactgaaacacctatagagtatctcagatggctaaaccagcagacccgttggagcaagtcctacttccgagaatggctgtacaatgcaatgtggtttcacaaacatcacttgtggatgacctacgaagcgattatcactggattctttcctttctttctcattgccacagtaatccagctcttctaccggggtaaaatttggaacattctcctcttcttgttaactgtccagctagtaggtctcataaaatcatcttttgccagctgccttagaggaaatatcgtcatggtcttcatgtctctctactcagtgttatacatgtcgagtttacttcccgccaagatgtttgcaattgcaacaataaacaaagctgggtggggcacatcaggaaggaaaaccattgttgttaatttcataggactcattccagtatcagtttggtttacaatcctcctgggtggtgtgattttcaccatttataaggagtctaaaaggccattttcagaatccaaacagacagttctaattgttggaacgttgctctatgcatgctattgggtcatgcttttgacgctgtatgtagttctcatcaataagtgtggcaggcggaagaagggacaacaatatgacatggtgcttgatgtatgatcttccatgttttgacgtttgcagtcacacacaacaccttagttcctctaggggctgtacagtattgtggcatcagataatgccaccaaaggagacatatcactgctgctgggacttgaacaaagacatttatatgggtttattttcattctgccaaagtaaaacaatacatcaacaagaagaaactcagatttaacctgttatttctatgaaaatgggatgaattctttgtttatgcactttttccttactgtgcatccgcctgaaagtgttttggcctatatacctcactagccatgctttatgtgggttatcatggaagaaaaggattttggaaactcaaggaaaagttctttcaacctatacaacctaacttatggactgtttgatagatgataattttttttttttaggaaggattttctttttaactttaccaaatgaaatgccaaaggaagttttaaaggccgtggctgtgctgtatttgatataattgtactgtgtttttaaattgtgtatgccaatcttaaagacaaattttgcatattctctattttacttttctgccaaaataaacctgttcttccttttttaaaataaaataagttcttaaaaaatttatacttaaaaaatcctgcccaaaatgtgaagcttggttgactgatgttcatgatagaaagaataaaatgtttctctctctctaccttttaaaattgaatagtttatttctgtgaaagaagtatttaaactttcaatattttaactttttgtttttatttcttttagaaaaggccaatatacctatcgcg

SEQ ID NO: 14528 - protein, 552 aa, Homo sapiens
  ref <308>: DATABASE ACCESSION NUMBER: SWISS-Prot / Q92819
  ref <309>: DATABASE ENTRY DATE: 2002-06-15
MHCERFLCILRIIGTTLFGVSLLLGITAAYIVGYQFIQTDNYYFSFGLYGAFLASHLIIQSLFAFLEHRKMKKSLETPIKLNKTVALCIAAYQEDPDYLRKCLQSVKRLTYPGIKVVMVIDGNSEDDLYMMDIFSEVMGRDKSATYIWKNNFHEKGPGETDESHKESSQHVTQLVLSNKSICIMQKWGGKREVMYTAFRALGRSVDYVQVCDSDTMLDPASSVEMVKVLEEDPMVGGVGGDVQILNKYDSWISFLSSVRYWMAFNIERACQSYFGCVQCISGPLGMYRNSLLHEFVEDWYNQEFMGNQCSFGDDRHLTNRVLSLGYATKYTARSKCLTETPIEYLRWLNQQTRWSKSYFREWLYNAMWFHKHHLWMTYEAIITGFFPFFLIATVIQLFYRGKIWNILLFLLTVQLVGLIKSSFASCLRGNIVMVFMSLYSVLYMSSLLPAKMFAIATINKAGWGTSGRKTIVVNFIGLIPVSVWFTILLGGVIFTIYKESKRPFSESKQTVLIVGTLLYACYWVMLLTLYVVLINKCGRRKKGQQYDMVLDV

SEQ ID NO: 14529 - DNA, 2997 bp, Rattus norvegicus; identical to SEQ ID NO: 12987
  ref <308>: DATABASE ACCESSION NUMBER: Refseq / NM_022713
  ref <309>: DATABASE ENTRY DATE: 2001-01-11

SEQ ID NO: 14530 - protein, 668 aa, Rattus norvegicus; identical to SEQ ID NO: 12988
  ref <308>: DATABASE ACCESSION NUMBER: Refseq / NP_073204
  ref <309>: DATABASE ENTRY DATE: 2001-01-11

SEQ ID NO: 14531 - DNA, 2983 bp, Homo sapiens; identical to SEQ ID NO: 12989
  ref <308>: DATABASE ACCESSION NUMBER: Refseq / NM_003241
  ref <309>: DATABASE ENTRY DATE: 2000-10-31

SEQ ID NO: 14532 - protein, 684 aa, Homo sapiens; identical to SEQ ID NO: 12990
  ref <308>: DATABASE ACCESSION NUMBER: Refseq / NP_003232
  ref <309>: DATABASE ENTRY DATE: 2000-10-31

SEQ ID NO: 14533 - DNA, 3395 bp, Rattus norvegicus
  ref <308>: DATABASE ACCESSION NUMBER: EMBL / AF057025
  ref <309>: DATABASE ENTRY DATE: 1998-04-15
tcgagcggccgcccgggcaggtttctaacttccctcctgagatgggcttattaattctagaacaaaaccaaaagtgagaatgctaaggttggcactctcacttcctcttgctctctagccagtatacctttgaatacaatatttacagaggggcaaccgctgggagagaaggggcaggggccccagggactctgccctgccaccatttacagttcgtcatgctttctcacggcctccgctggttgcagaaaatgccaggatgatgcctctcttgcatctggctgggactctgatcatggcattgttcctttcctgcctgagaccaggaagcttgaatccctgcatagaggtacttcctaatattacctaccaatgcatggatcagaatctcagcaaaatccctcatgacatcccttattcaaccaagaacctagatctgagcttcaaccccctgaagatcttaagaagctatagcttcaccaatttctcacaacttcagtggctggatttatccaggtgtgaaattgagacaattgaagacaaggcatggcatggcttaaaccagctctcaaccttggtactgacaggaaaccctatcaagagtttttccccaggaagtttttctggactaacaaatttagagaatctggtggctgtggagacaaaaatgacctctctagagggtttccatattggacagcttatatccttaaagaaactaaatgtggctcataatcttatacattcctttaagttgcctgaatatttttctaatctgacaaacctagaacatgtggatctttcttataactatattcaaactatttctgtcaaagacttacagtttctacgtgaaaatccccaagtcaatctctctttagacctgtctttaaacccaattgactccattcaagcccaagcctttcagggaattaggctccatgaattgactctaagaagtaattttaatagctcaaatgtactgaaaatgtgccttcaaaacatgactggtttacatgtccatcggttgatcttgggagaatttaaaaatgaaaggaatctggaaagttttgaccgttctgtcatggaaggactatgcaatgtgagcattgatgagttcaggttaacatatataaatcatttttcagatgatatttataatctcaattgcttggcaaatatttctgcaatgtctttcacaggtgtacatataaaacacatagcagatgttcctaggcatttcaaatggcaatccttatcaatcattagatgtcatcttaagccttttccaaagctgagtctaccttttcttaaaagttggactttaactaccaacagagaggatatcagctttggtcagttggctctgccaagtctcagatatctagatcttagtagaaatgccatgagctttagaggttgctgttcttattctgattttggaacaaacaacctgaagtacttagacctcagcttcaatggtgtcatcctgatgagtgccaacttcatgggtctagaagagctggaatacctggactttcagcactccactttaaaaaaggtcacagaattctcagtgttcttatctcttgaaaaacttctttaccttgacatctcttacactaataccaaaattgactttgatggcatatttcttggcttgatcagtctcaacactttaaaaatggctggcaattctttcaaagacaacaccctttcaaatgtctttacaaacacaacaaacttaacattcctggatctttctaaatgccaactggaacagatatctaggggggtatttgacacactctacagactccagttattaaacatgagtcacaacaacctactgtttctggatccatcccattataaacagctgtactccctcaggactcttgattgcagtttcaatcgcatagagacatccaaaggaatactgcaacattttccaaagagtctagccgtcttcaatctgactaataattctgttgcttgtatatgtgaatatcagaatttcttgcagtgggtcaaggaccagaaaatgttcttggtgaatgttgaacaaatgaaatgtgcatcacctatagacatgaaggcctccctggtgttggattttacgaattccacctgttatatatacaagactatcatcagtgtatcggtggtcagtgtgcttgtggtagccactgtagcatttctgatataccacttctattttcacctgatacttattgctggctgtaaaaagtacagcagaggagaaagcatctatgatgcatttgtgatctactcgagccagaatgaggactgggtgagaaacgagctggtaaagaatttagaagaaggagtgccccgctttcagctttgccttcattacagggactttattcctggtgtagccattgctgccaacatcatccaggaaggcttccacaagagccggaaagttattgtggtggtgtctagacactttatccagagccgttggtgtatctttgaatatgagattgctcagacatggcagtttctgagtagccgctctggcatcatcttcattgtccttgagaaagtggagaagtccttgctgaggcagcaggtcgaattgtatcgccttcttagcagaaacacctacctcgagtgggaggacaatgctctggggaggcacatcttctggagaagactcaaaaaagccctgttggatggaaaagccttgaatccagatgaaacatcagaggaagaacaagaagcaacaactttgacctgaggagtacaaaactctgcgcctaaaacccattatgtttacaatttccgaatgctacagttcatctgggtttctgctgtggacagggaggccagggagcacgaggcttctaacctcaacgacctcacagggcacaaggaagtagcaatgtgatgaaaccccatactttccatgtgtatcaggtgtatgaattaagcaactcaggcaaagaatcataatcagcaaagtttactcttataaaacctaaggagaggaggctaaggcccagtgagaacagaaaggaacatcattcttctctggatctttgaatataagcacaacatgtagtgtgctgcagttaccttagaagagttttgatcatttaaactgaagtgaatgtttccttcctttccctttttctattgaatataatttaaatggcactgactctttttgagagaccctcattcaaatttcttcttccattttctgtcagtttctttttttttaaatctagttctacaagaaatatgactgatacatgctcaaagatatcctggtcaatccttagaatgctatatttataaaataaaaatttttagtgtacttttattttttaaaacaaaaaaaaaaaaaaaaaaaaaaaaaaaaa

SEQ ID NO: 14534 - protein, 603 aa, Rattus norvegicus; identical to SEQ ID NO: 7597
  ref <308>: DATABASE ACCESSION NUMBER: SWISS-Prot / P35859
  ref <309>: DATABASE ENTRY DATE: 2001-10-16

SEQ ID NO: 14535 - DNA, 18974 bp, Homo sapiens
  ref <308>: DATABASE ACCESSION NUMBER: EMBL / AF177765
  ref <309>: DATABASE ENTRY DATE: 2001-10-29
tcccctactttcttcacattctgcagtaaacttggaggctgcatgttgaatatgaaagtataatgaaataaaagaagcctagaaccaggaatcatacctggggtaatccaatcagaaatatcctcattgagtgtttcatgagccaggaaaacttttattaagtcacaataaaatctggaagtttatacagcaattagcttagtctaacacttgtcagttttgtgcatatttcttacagcatatgcattacctgccaaataaaagcaaacacttctaggtccctggcgaatatgggattcctccattgactgactgattatgggtcctgagttgaacttgctctgcatgaaggatgtaggcgatcaagtggcttgttttgcctctggccaaatctctaccactatgcttaagatgcgattaattatgtacaacaaacccccatgacacacgtttacctatgtaacaaacctgctcatcctgcacatgtacttctgaatgtaaaaataaaagtaaaaaaaaagaaaacaagaggtggttattattctactgtgggagaaattataggcccataatggtaactaatcaccacggtcttacctcattataatactgcatcggtaagttcatcaacataagcaagttagatctgataaccaaggggcttacagtttctaatttgtatttgacacatggtctgccttctggaagagcagcatagaacctagatgtctttgattaaggtcagtaaatgattgagtgttaatcccattcatttcccaggaaaaggaaacctctttacaagtcaccaccagggattctccaatcacacataggaaaaatttccaggaagacttctataaaacacatgtattaacatctccgaaaacatagttgaaaggacttccctgggcccttttccttagttcctcatctagactatcaagcggtttcctctccaaatgatgggaagaaagtgcatttgtctattacacacttgtattactctattcacttaagcactgtgtcccagtaatggggtctagttatgtctggcttgaaatgacccacatatttgtttctcattcttaggaagtggagtgtttctgtatgtgtatatgtgatgggggtaggccaggagattttttatctaggcaatacccagcctgaaatcattattagcatgacatgagttaaacgtatttctattttagaaagatgttttcaacagcaggatgaagaatcaattggaagagctggtacattgaaagaggtgaatctagactttgggaggcttcttaaagtatattgaactagtctaggccgtgggatatgttcaatagtaatggtagtagaaatggcgactgacattttggaattattttacagatacaatttctacaacttggtggaacattttttaaaatgtaggttttattattcggctatggtgaaaacaacagatcagaagatgatgccactggaaatatagtttgttgtttacagttcctaagaagcgggggcatgccacaccatgcagggccacattggtagcaccagagtccgtcaggaggcagagggagcaagaggaaattataggcacaagcttttattgttgttactgcagaaaaggcaaggcaaggcagggtaagcagggataggactggctagtttgaataacctcagtgggctctggggtagagggtctgtctctagttgtctggtacctggacctgtgatgattagggctgaataacagtgtctacttgggtgtaaaagccaggtagaggaggtggttcagaggaagggctctggattgcttagtgtgcataaggcatgctccagagcaaatcttttgctattttttagaactaactagccctggtaagtgcagtctcttcccagatgccagaacatcaagaacacagaaaagaagacaattgggttaatacatgtttagcatgagaaatgaggaagtaagggaaataaagtcaaagagatttccaccttggatgactatgtcaaagtgaaacaccattaactttccagggaactaaactttattgagcacctactctgtgtcaggcactgctctaaaatctttacatgaataatctcaatactcagagcaaagctttgacatggaggttgtttttatcttaactctactggtgtgttgatggagtctacaagagtttgtgcccagtccaccacaaaatggtccctcacagcttggtttttgacacgttggattggaagtgcttggaggatattacagtagaactatctaggacttagcatacataatattcctgttttaaatcaggttcttatttaacagaaacttacattgcacttgctactttccagacactgtcctaaaagctttacaaatgccagttcatttaatcccaatacaatactttgagatacatattatcatcttcattctatccacattttcaatcctcatcatagctctcatttatggaatgtaatgatgatgctctagactagacgttttacgtaagttagcttaattcagtaattcaaaacacatgcgattatcttcgttttaaagaccagaaaactaaaggttggtaggtttgtataatttgactaccattgcgtatctttattttaatacattttataaatgcaagcttctgctatgattaaaagtgattaccacattttacagaccagaaagtaataataagtgttggtgaagatgtgaaaaaatgagaactcctgtacaccatttgtgggaatgtaaaatggtacagatgctgtggagaatcatatggtgggtgctcaaaaaattaaaaatagatttaccacatgatccagcaatctcacttctgagtacgtatccaaaagaattgaaaacagagactttaagagatatttgtacaaccatgtttatggcagcattattcacaatagctaacgtgtggcaacaatgcaagtgtccatgaacagacaaatggataagcaaaatgtggtctatacatacaatggaatattgttcagctttaaaaaggaaggaggctttgatctatactacacagaaaagaaccttgaggacattatgcaaagtgaaataagccagtgacaaaaagatacatactgtatgattccacttctaagagctgcctagagtagtcaagattatagagacaaaagtagtgcatagattcaagggcctagggaaaggggaaatggggagttatttattaatgaatagtggtgatgattgtacaaaaatatgaacataattaatgccactaaattgtacacatacaaatggtcaagataataaattttatgttatgtcatgttatgttatgtgattttaccataatacagaaaatgaaaaaagaaaagaaagaaagtaaagcttagcggtttacatgacttgaccaatgcctcaaagccatgagtcacccagctgagatctgaacttcagtatattccattctgaaatcccagacttttcccaatcttcttgtacttttcaaactgtgtttcagttgaggtttattttcagttttgtatgtgagtttcttcacaagaaggggcgggccaaattgtgtcctgcaaaaacctacatatcgaagtcctaacccctctacctcagactatgactgtatatggagagagagccttgaaagaggtatgtaaggtagaatgaggtcattatggtgggccctaatccaacataactggtgtccttataagaaggggagattagaattcagacacacttgctgacaccttgagttcagactggaagcctctagaattgtgagaaaatgaatgtctgttgtttaagccacccagtctgtggtatttccttatggcagccccagcaaactaatacaaatagtgtttccacagctgaaacaaaattggaaaatcaccgtcatcctagagagttacaagggctattttaatagaacctgattgttttcctaaattcaccaagcccaggcagaggtcagatgactaattgggataaaagccaactagcttcctcttgctgtttctttagccactggtctgcaggcgttttcttcttctaacttcctctcctgtgacaaaagagataactattagagaaacaaaagtccagaatgctaaggttgccgctttcacttcctctcaccctttagcccagaactgctttgaatacaccaattgctgtggggcggctcgaggaagagaagacaccagtgcctcagaaactgctcggtcaaacggtgatagcaaaccacgcattcacagggccactgctgctcacagaagcagtgaggatgatgccaggatgatgtctgcctcgcgcctggctgggactctgatcccagccatggccttcctctcctgcgtgagaccagaaagctgggagccctgcgtggaggtatgtggctggagtcagctcctctgaactttccctcacttctgcccagaacttctcactgtgtgccctggtttgtttatttttgcaaaaaaaaaaagagttaaattaccttaaagactcaagaagccacagagatcaaataattcattgttacagggcactagaggcagccattgggggtttgttccatttggaaattttgagtgctaacaggggcatgagataacatagatctgcttaaggtccctgctctgctaccttgtggctctgtgaagaaattatcaaacctgtctgagactagttttcgcatctgtaagagaattataataccttcttcactagagagtaagcagactgcttcagtgtcatttcttcccactggtggtctttacactcagcttcaagcagtcaccctgctcctttcaatctcaggaaaaagatggcttttgtgtgtgtgtctctagagaaagaactttctaagtgggtgtcagacttctgtatgcagtaatatagtttagtccagaggatgaaaaaaataagagaatgaaaaaggaaaagagagagagagagaagaaaaaagcaagagggaaatatgtataatgtcagctaatgcaacagtttctttcttagtgaaataccaatcagctggttggtaatcttattcatgatggatctcttttgtttttcccctgcgcagacttcacagttgctttagaaacccatagtagagccgaacagctaagaaaatgatttacagtgaggcagggtcagaaactcaagagagaaaaagccagctgcagtcctgaagttgaggatataggagaaaatcaagtaatatttagcaaagactaattcattatcttgaagccatcccttccctcaattccctgcccatagtcctcctccttgtcctcttctctgtatccctctgctgttaggttaatggagatagattttctaattaggctcactgcgagataaaaccacagccaaacttgacttcttttccccatgtaccttttcctgtcagtccctgaagcctgtccatccctgcccatccccttagttccactgtaaggcaggccctcatttcccctggcattgactcttacacactaactgctttcctgattccagtcttcttcctttaactcattctgcacgttcttgtttgttatgtacttgcatttgttgttattatttttccttaggcttcaatctaacaaattactctccttaaaaacttttaataactctccattgccattagaacagctttctaccacagggcctttgcactggctatttcttctacctagaatgctagatcagtgctatccattggcaatattatgtgagccacatatgtacttttaaagtttttagtagcctcattaaaaaaagaaacaagtgaatttaatttcgataatagttttatttaacttagcgtatttaaaataatgtttaaaattttaatatatatttacctattattgatatttttacattccttgtttggtactaagtctggaatttagtatatattttacatttaccacacttctcaatttacactattcacatttcttgtgtttgataactgtgtatggctagtgactaccgtattggtcagtgcagcccaagtccttttcatgctttaatcactccattcagatctctgattaaatgtcccctcctcagggcagtcttccttgattgccccatgtagagctctccagcctcacttatttgcctcaaatccccttatactgcttaatatttttttttctagagcacaacattttatatttttgtttgtttattttctctctctccctttgtaatggaatcggtaaggaggcaggatcattgctggttttatttaccactatatttccagtggccagcacacagtagccgctagatgtgtaagtgataaatgattgaaataattgctgcaggacaaagtctgaggccctcctgatctggcttgccctcttacttagatttcaccactcccaccactcaccagctaatctgagtttgttttccactctttacgtgctcacgttgtcctctccttaggacatgtttttcttcccctttccacatatctaaaccttactcatcttccaagacccactttaaaatcttccttttctgggaagcctttcctgaatccagacttgatctctgctttctctgaaccacagggcatattttctaagcctattttatggccccttgagatagtgttagctttgctcctatctaaactcttactctagactgtgagtccattgaagtctggagctgcatcatatttttctttgtaatgcccacagcacttggcaggaaatgcctacaatttggacttaagtaaaccttcatttaatcagttattcaatcagttagtgattcagcaaatatttattgagcaccaaccatttgccagacaccattctgagtgctggagacaaagcagtgggcaaacccatcaaacttgcaatggaatacaggagatgaacaatacgatgagaacaatcagatagacaacataatgttagatggttgtgcttcctgtgaaagggaataaaagagggcaaagaaagagtgcctggcactgtttctattagacaatattgtctttgaggctccatggcttgcaacatttaagcagacatacgaatgaagatctgcatgtttgaactctgactttgcgcatattacttcatttctttgaatttccattttcctcatctttaaatgcttatttgaagattaagtgaaagtatataacaaacaagaactatgcaggcgtatggtaagggattaatgatagatgataataattaatgttgacatctattgatcacttatactgtagcgggcttttaaataaactctttaaacaccttatctcatttaatccttcaaacattctattggtttcaaacaacagaaaactacaattagctggcttctgcaaggaattttgttggaggaaatgagagcattcagaaattagatgggagcgttagagaattaggcttacaaagaatgtgggaaagtaggctagaaagcagtgtaaaaacaaagacagcataaagcacttgaccttatttactaggttccaccatgggaatccatgcactctaaagatttccccctatttctacatcactttgctcaagggtcaatgagccaaggaaaagaatgcagttgtcaaaatctgggccatgactaaggaaggtctggacatcttgactgccagacagtctccccaatgatatggagtatttagaatgatactggatattttatttattttttgtattttcaacttttaagttcagaggcacatgtgcagagcatgcaggtttattacataagtaaatgtgtgccatggtgatttgctgcatagatcatgaaaatatggaacgcatcatggatttgtgtgtcatccttgtgcaggggccatgctcatcttctctgtatccttccaattttagtatatgtgctactgcagcaagcacgatattggatattttattacctacattttacatatgataaaatgaggctcactgaggtttttcttttgttcgttttattttgttttgtttttaaagacttggccctaaaccacacagaagagctggcatgaaacccagagctttcagactccggagcctcagcccttcaccccgattccattgcttcttgctaaatgctgccgttttatcacggaggttagaatgctgagcacgtagtaggtgctctttactttctaatctagagtaagacaatttataagcatgaattgagtgaatggatggatggatatatggatggaaggatggacagatggatgaaaggttgactgaattttgtgcttgcacaaaaagaggcccctctccaccatctctggtctaggagaggggagttgggagaccatgcagtaaagatacttcatgtcatgtgtaatcattgcaggtggttcctaatattacttatcaatgcatggagctgaatttctacaaaatccccgacaacctccccttctcaaccaagaacctggacctgagctttaatcccctgaggcatttaggcagctatagcttcttcagtttcccagaactgcaggtgctggatttatccaggtaatgaatccacttttacatactgcacaaggtgaggtgttcattgtcctatcatttcattattggactggaaagcttggtttgtggagtctcatcttcattcacttattcattcatacaacagatgtcttattaactatataaccttgagcaagctacctctattctccaggtctcagttttctaatctgtgaagtaggcagttggctgagacagcttctaagggcaattctaattttaggttttcttttaagacaggagagaaaattagcttaaattctttcataagcagctatttattgactacttgctatatgttgtacactctgcaagaagacaggcatatattgatatataacacacagcccctgttgttaaggaggcatatcttcttgaaagagttaataccttaaagtcctgggtatggtcctgggtacatagtatatagtcaacacattttaattatgattttttggatctggaaactgatataaagatagcgacatataacagtaggtgataaattatgtttaaactaaaggtaactaattgtatttttcagaagaggggccttctctgtggtgggtagtcaagaaagatttcatgaactgcataagattcaaacaatgtctagaatattaaaactagtgtacaggatagggaattaggaaaagacaagtaacccaaggagaaagatgtcaagattaaaggaaaacatctgctgtgggcagggaataatggctaagattttcttttctgatgcagggaagtatatcgtttgttgtggcaggtgaaatgtcatcttgatattttaggggaaccaaattctaaaagggttttcatcatcggggccttatttgcaaatcgaactagataatggatcatgttctctgcaatggtttgtaaaacatttcaaaacattttacatattttttattatagaaattattgataaagactaaggtcacagtataaaaatcctttttagagcagacatttctgtagaagagtgaacatatgacctattatactctaatttggatatagataggatgtaacaaaggagtaatggaacaattcaaaggcagtggtatagtgcatagagtcctgttggggtcagaagacctgagccaagtttacccccaacatttataaccatgtaaccttaggcatattacttcatctcccttaatcttagttttcatatctgatcaatggaaatgatgaaacttattctgctggattaaatgtgataataaatattaatatgctgtatatatttaaatttttataaaatatattttataagcataaagtattcttacagaatttcattaggtttttaaaataatttcaacttttatttttgattcagggatttacatggttatattgcgtaatgctgaggtgtagggtacaatcgataccatcactcaggtagtgagcatagtacccaatagttagtttttcaacccttgctgctttctctctatcccctctctagtaatccccagggtctatttttgtcatctttatgtccatgtgtactccatgtttggatcctacttataaagtgagaactcatggtatttggctttctgttcctttgttaatttgcttaggataatggctactagctgcatctatgccattatgttctaaatttcagtttcctgcatgaaaattttgtcaagtactctattaaggtagaccacctctcccttttttttttttcaaacaagaagtagtttttcaccaaacaatgtctcttatgtaattcatcttcaatccactggatacccaataaacttgccccagaaaccttaaatctgtgcttacagagaggccagcttcccttcttgttaacccataggagattctgaattagggcaagcacaaaagatagcacaatagacatcctttgccttttcgtacagtgttcacatacagtaactcaactagtcttgtaagaatgctttgtgatagaccaggcagccttctttcccctatagaaatatatatatatttctttttataggtgaggaaactgaagcttgaataatttaaatgacttatatacattatcattgcttgttagccacagaccagagatttaagttcacatctccagaatccaacttaaatgttttctttgtcttaatactctacttctctaaagtgattatcaccaatgtaatgatatagagacacagcaagaccctttccttctcacctaatgtatagagcaatgcagagatagaatgatgggctataacaatcatataattgaaagaaagaacttcaaaaataatcaagttcagctgtttgacttataaatgtgataactaaaacctagagaggaaaagaggtactcaagatcacacagtaggagaggactgcagaaacaccaaacccaagctcttttgtccactcttccagcgttctttctactatactgcctatcctttatctagttaccaataaataacaaaagcttggaccacaatgcttttattgtctaggaaactcctgaagaagctaaataaaatgggtggggaatattgtaaatgtaattcaggctggattaagaaagaacttatttgtacattgtaactgacaagcacctgcaatgctgaaaggaatttttcattggcttgctgtttgctggctgcatcaaagccctgtctctaggacatgtctctgaacattgtgtgtagcatggctttcatttcttttaggataaaattcaaaaccctttatctggttggtaaacctctgcctaattgggaaccttctttctccacaactccatattgtacactccaatttcatctctgttctccaaccatggaagctatttgtcatgattcctccttgtgtcattttttttctgtcaaccttggggcttttgtgtttgctgttcacttcacctccttttattgttaacttctactcatctttcaattttcaacttaagtgttctcagagaaacctactttgattttcttggtccacaacggttctctggatgtgaactcttatagcacataattttcacttttttccacaaaactcgctcctatcacctgttacaagcatttacctctgataacaagaactttcaaatatctagctgtcatgtaagcacttttcataaacattaagagtatctgtgacacttatgtgtaatgtttcgtatctctgaaattgatatttaccagtcatttatcttggctaccaactaacaactatccatattatctgtaccaatcagatgtataatcacaattttgtgtgacagaaaatggctaaacttgatccaaggctattacatgctttatcaactgcacaatctttatatatgtcaattattgatctttaactgatttccttcttatggattttctcctctgcttatcatgtatgcctaacatgacaaaaaagagcctatcattgcagccagtatgataatactcagtctgtggggcttcttatttgcttattccatcatcatctgtcctgcttgatgtctttgcctatgcacaatcatatgacccatcacatctgtatgaagagctggatgactaggattaatattctattttaggttcttattcagcagaaatattagataatcaatgtctttttattcctgtaggtgtgaaatccagacaattgaagatggggcatatcagagcctaagccacctctctaccttaatattgacaggaaaccccatccagagtttagccctgggagccttttctggactatcaagtttacagaagctggtggctgtggagacaaatctagcatctctagagaacttccccattggacatctcaaaactttgaaagaacttaatgtggctcacaatcttatccaatctttcaaattacctgagtatttttctaatctgaccaatctagagcacttggacctttccagcaacaagattcaaagtatttattgcacagacttgcgggttctacatcaaatgcccctactcaatctctctttagacctgtccctgaaccctatgaactttatccaaccaggtgcatttaaagaaattaggcttcataagctgactttaagaaataattttgatagtttaaatgtaatgaaaacttgtattcaaggtctggctggtttagaagtccatcgtttggttctgggagaatttagaaatgaaggaaacttggaaaagtttgacaaatctgctctagagggcctgtgcaatttgaccattgaagaattccgattagcatacttagactactacctcgatgatattattgacttatttaattgtttgacaaatgtttcttcattttccctggtgagtgtgactattgaaagggtaaaagacttttcttataatttcggatggcaacatttagaattagttaactgtaaatttggacagtttcccacattgaaactcaaatctctcaaaaggcttactttcacttccaacaaaggtgggaatgctttttcagaagttgatctaccaagccttgagtttctagatctcagtagaaatggcttgagtttcaaaggttgctgttctcaaagtgattttgggacaaccagcctaaagtatttagatctgagcttcaatggtgttattaccatgagttcaaacttcttgggcttagaacaactagaacatctggatttccagcattccaatttgaaacaaatgagtgagttttcagtattcctatcactcagaaacctcatttaccttgacatttctcatactcacaccagagttgctttcaatggcatcttcaatggcttgtccagtctcgaagtcttgaaaatggctggcaattctttccaggaaaacttccttccagatatcttcacagagctgagaaacttgaccttcctggacctctctcagtgtcaactggagcagttgtctccaacagcatttaactcactctccagtcttcaggtactaaatatgagccacaacaacttcttttcattggatacgtttccttataagtgtctgaactccctccaggttcttgattacagtctcaatcacataatgacttccaaaaaacaggaactacagcattttccaagtagtctagctttcttaaatcttactcagaatgactttgcttgtacttgtgaacaccagagtttcctgcaatggatcaaggaccagaggcagctcttggtggaagttgaacgaatggaatgtgcaacaccttcagataagcagggcatgcctgtgctgagtttgaatatcacctgtcagatgaataagaccatcattggtgtgtcggtcctcagtgtgcttgtagtatctgttgtagcagttctggtctataagttctattttcacctgatgcttcttgctggctgcataaagtatggtagaggtgaaaacatctatgatgcctttgttatctactcaagccaggatgaggactgggtaaggaatgagctagtaaagaatttagaagaaggggtgcctccatttcagctctgccttcactacagagactttattcccggtgtggccattgctgccaacatcatccatgaaggtttccataaaagccgaaaggtgattgttgtggtgtcccagcacttcatccagagccgctggtgtatctttgaatatgagattgctcagacctggcagtttctgagcagtcgtgctggtatcatcttcattgtcctgcagaaggtggagaagaccctgctcaggcagcaggtggagctgtaccgccttctcagcaggaacacttacctggagtgggaggacagtgtcctggggcggcacatcttctggagacgactcagaaaagccctgctggatggtaaatcatggaatccagaaggaacagtgggtacaggatgcaattggcaggaagcaacatctatctgaagaggaaaaataaaaacctcctgaggcatttcttgcccagctgggtccaacacttgttcagttaataagtattaaatgctgccacatgtcaggccttatgctaagggtgagtaattccatggtgcactagatatgcagggctgctaatctcaaggagcttccagtgcagagggaataaatgctagactaaaatacagagtcttccaggtgggcatttcaaccaactcagtcaaggaacccatgacaaagaaagtcatttcaactcttacctcatcaagttgaataaagacagagaaaacagaaagagacattgttcttttcctgagtcttttgaatggaaattgtattatgttatagccatcataaaaccattttggtagttttgactgaactgggtgttcactttttcctttttgattgaatacaatttaaattctacttgatgactgcagtcgtcaaggggctcctgatgcaagatgccccttccattttaagtctgtctccttacagaggttaaagtctagtggctaattcctaaggaaacctgattaacacatgctcacaaccatcctggtcattctcgagcatgttctattttttaactaatcacccctgatatatttttatttttatatatccagttttcatttttttacgtcttgcctataagctaatatcataaataaggttgtttaagacgtgcttcaaatatccatattaaccactatttttcaaggaagtatggaaaagtacactctgtcactttgtcactcgatgtcattccaaagttattgcctactaagtaatgactgtcatgaaagcagcattgaaataatttgtttaaagggggcactcttttaaacgggaagaaaatttccgcttcctggtcttatcatggacaatttgggctagaggcaggaaggaagtgggatgacctcaggaggtcaccttttcttgattccagaaacatatgggctgataaacccggggtgacctcatgaaatgagttgcagcagaagtttatttttttcagaacaagtgatgtttgatggacctctgaatctctttagggagacacagatggctgggatccctcccctgtacccttctcactgccaggagaactacgtgtgaaggtattcaaggcagggagtatacattgctgtttcctgttgggcaatgctccttgaccacattttgggaagagtggatgttatcattgagaaaacaatgtgtctggaattaatggggttcttataaagaaggttcccagaaaagaatgttcatccagcctcctcagaaacagaacattcaagaaaaggacaatcaggatgtcatcagggaaatgaaaataaaaaccacaatgagatatcaccttataccaggtagaatggctactataaaaaaatgaagtgtcatcaaggatatagagaaattggaacccttcttcactgctggagggaatggaaaatggtgtagccgttatgaaaaacagtacggaggtttctcaaaaattaaaaatagaactgctatatgatccagcaatctcacttctgtatatatacccaaaataattgaaatcagaatttcaagaaaatatttacactcccatgttcattgtggcactcttcacaatcactgtttccaaagttatggaaacaacccaaatttccattgaaaaataaatggacaaagaaaatgtgcatatacgtacaatgggatattattcagcctaaaaaaagggggaatcctgttatttatgacaacatgaataaacccggaggccattatgctatgtaaaatgagcaagtaacagaaagacaaatactgcctgatttcatttatatgaggttctaaaatagtcaaactcatagaagcagagaatagaacagtggttcctagggaaaaggaggaagggagaaatgaggaaatagggagttgtctaattggtataaaattatagtatgcaagatgaattagctctaaagatcagctgtatagcagagttcgtataatgaacaatactgtattatgcacttaacattttgttaagagggtacctctcatgttaagtgttcttaccatatacatatacacaaggaagcttttggaggtgatggatatatttattaccttgattgtggtgatggtttgacaggtatgtgactatgtctaaactcatcaaattgtatacattaaatatatgcagttttataatatcaattatgtctgaatgaagctataaaaaagaaaagacaacaaaattcagttgtcaaaactggaaatatgaccacagtcagaagtgtttgttactgagtgtttcagagtgtgtttggtttgagcaggtctagggtgattgaacatccctgggtgtgtttccatgtctcatgtactagtgaaagtagatgtgtgcatttgtgcacatatccctatgtatccctatcagggctgtgtgtatttgaaagtgtgtgtgtccgcatgatcatatctgtatagaagagagtgtgattatatttcttgaagaatacatccatttgaaatggatgtctatggctgtttgagatgagttctctactcttgtgcttgtacagtagtctccccttatcccttatgcttggtggatacgttcttagaccccaagtggatctctgagaccgcagatggtaccaaacctcatatatgcaatattttttcctatacataaatacctaagataaagttcatcttctgaattaggcacagtaagagattaacaataactaacaataaaattgaatagttataataatatattgtaataaaagttatgtgaatgtgatctctttctttctctctctcaaaatatcttactgtactgtactcacctattttcagaccataactgaccatgaaacctgggaaagtgaaactgtggataagtgaggaactaacatacatacatgattgtttatctacagatgtatgcctcagtttcttagtatgcttgaaaatgtatgattttgtgtatatccgtgctacatgtaagtgtggttctattcatatttgaatatgaattctgcataagtgtgtttattcaagcaaatgtacaaggctctgagaaggaagatcaacatacaacttggaatatttcaaggccgaaatattcaaggctgacattggcctccttcctatcagttccctctcccagatggaaattctagaaatggcaggtgaggtggacaagcagggaaagaaattatatgcatagaacagaaggagaagaaagagtaaagtcaggcctcagccagcctctttttagctctttaaatcctctggatttaagagggataaagggtggaataaggataaattaatgccaattgtaatgccttaaatttgtgtgataccttacaacttgaaacatattcacaaaactatatatttgaatatctcattagctgagtaaggtagcaaatcataattaactttttccattttattgatgggaaagctgaagttcaatgaagtaaatttttcaatagcccacagagtaggaaagtgacaaaacctgagcctgggcctccaggtcactcaaggacactttctttcttccacacccaattgcttcatgcttaaagttggcaaaacaggaagtgaaactcctgcagttttctgtgtggttgacactagcaagggtttctcagttgaagccatgaatcattaagccaatacatatgcatatatgttatacataccaaatgatttatttataaccctatctttccataaaggacttgaaggagcttcaaacaaaggatatgtgaacaatagggttaatcaataataagtagaaaatctggacatagaataaaaagaggagagaaagacaccgagaatgagcgttaatacagtgctttccatttttctggtgttttgagtagcgtggcttttggagaaagccaaaactcaaattcactccttatcaactgtgtgccttgggctccatttctctgagagtctacttagctccaatgtaaaataagaatagaactatgactttgtaaggttgctctaaggattgaaaatcatgtattatgttcaatacggggacactgtccttatgggtgagtactcccctaagactttattaagagggcactaggagaagcactgggaggtcttctcagtaacaacactaaagtaattgctatttttccagcctgtggaaccacagaagtgactgtaactaaaattagacatttctttctgattcattctctactcacgggattgtcagaccccagtcttcttctggactctataaactttttagaaatcatcagcaggctcctggagaagcttaaatgaactcacacaatatgtgacagtgaactccctgggagagtgaaaaccaaagtctaagccagtgtctccatttacttgtgtgattgtgggcaagtcattcaagtgctttgaggctcaggtcttaattcatga

SEQ ID NO: 14536 - protein, 839 aa, Homo sapiens
  ref <308>: DATABASE ACCESSION NUMBER: SWISS-Prot / AAF05316
  ref <309>: DATABASE ENTRY DATE: 2002-06-15
MMSASRLAGTLIPAMAFLSCVRPESWEPCVEVVPNITYQCMELNFYKIPDNLPFSTKNLDLSFNPLRHLGSYSFFSFPELQVLDLSRCEIQTIEDGAYQSLSHLSTLILTGNPIQSLALGAFSGLSSLQKLVAVETNLASLENFPIGHLKTLKELNVAHNLIQSFKLPEYFSNLTNLEHLDLSSNKIQSIYCTDLRVLHQMPLLNLSLDLSLNPMNFIQPGAFKEIRLHKLTLRNNFDSLNVMKTCIQGLAGLEVHRLVLGEFRNEGNLEKFDKSALEGLCNLTIEEFRLAYLDYYLDDIIDLFNCLTNVSSFSLVSVTIERVKDFSYNFGWQHLELVNCKFGQFPTLKLKSLKRLTFTSNKGGNAFSEVDLPSLEFLDLSRNGLSFKGCCSQSDFGTTSLKYLDLSFNGVITMSSNFLGLEQLEHLDFQHSNLKQMSEFSVFLSLRNLIYLDISHTHTRVAFNGIFNGLSSLEVLKMAGNSFQENFLPDIFTELRNLTFLDLSQCQLEQLSPTAFNSLSSLQVLNMSHNNFFSLDTFPYKCLNSLQVLDYSLNHIMTSKKQELQHFPSSLAFLNLTQNDFACTCEHQSFLQWIKDQRQLLVEVERMECATPSDKQGMPVLSLNITCQMNKTIIGVSVLSVLVVSVVAVLVYKFYFHLMLLAGCIKYGRGENIYDAFVIYSSQDEDWVRNELVKNLEEGVPPFQLCLHYRDFIPGVAIAANIIHEGFHKSRKVIVVVSQHFIQSRWCIFEYEIAQTWQFLSSRAGIIFIVLQKVEKTLLRQQVELYRLLSRNTYLEWEDSVLGRHIFWRRLRKALLDGKSWNPEGTVGTGCNWQEATSI

SEQ ID NO: 14537 - DNA, 387 bp, Rattus norvegicus
  ref <308>: DATABASE ACCESSION NUMBER: EMBL / AI044423
  ref <309>: DATABASE ENTRY DATE: 2000-03-03
ttttttttttgggattagatggtgctggaaaaacgacaattttgtacagattgcaggttggagaagttgttactaccattcccactattggatttaatgtagagacggtgacatacaaaaatctcaagttccaagtttgggacttaggcggacagacaagtatcaggccatactggagatgttattattcaaacacagatgcagtcatctatgtcgttgacagttgtgaccgagaccgaattggcatttccaagtcagagttagttgccatgttggaggaagaggagctgaggaaagccattttagtggtgtttgcaaataaacaggacatggagcaggccatgacgccctcagaaatggccaatgcgcttgggttacccgccctga

SEQ ID NO: 14538 - protein, 181 aa, Rattus norvegicus; identical to SEQ ID NO: 5287
  ref <308>: DATABASE ACCESSION NUMBER: SWISS-Prot / P41276
  ref <309>: DATABASE ENTRY DATE: 2002-06-15

SEQ ID NO: 14539 - DNA, 1008 bp, Homo sapiens; identical to SEQ ID NO: 5288
  ref <308>: DATABASE ACCESSION NUMBER: EMBL / L28997
  ref <309>: DATABASE ENTRY DATE: 1999-06-30

SEQ ID NO: 14540 - protein, 181 aa, Homo sapiens; identical to SEQ ID NO: 5289
  ref <308>: DATABASE ACCESSION NUMBER: SWISS-Prot / P40616
  ref <309>: DATABASE ENTRY DATE: 2002-06-15

SEQ ID NO: 14541 - DNA, 427 bp, Rattus norvegicus; identical to SEQ ID NO: 13389
  ref <308>: DATABASE ACCESSION NUMBER: EMBL / AI071511
  ref <309>: DATABASE ENTRY DATE: 2000-03-03

SEQ ID NO: 14542 - DNA, 31737 bp, Homo sapiens; identical to SEQ ID NO: 13390
  ref <308>: DATABASE ACCESSION NUMBER: EMBL / AB011399
  ref <309>: DATABASE ENTRY DATE: 1998-08-25

SEQ ID NO: 14543 - protein, 1816 aa, Homo sapiens; identical to SEQ ID NO: 2337
  ref <308>: DATABASE ACCESSION NUMBER: SWISS-Prot / P55196
  ref <309>: DATABASE ENTRY DATE: 2002-06-15

SEQ ID NO: 14544 - DNA, 488 bp, Rattus norvegicus
  ref <308>: DATABASE ACCESSION NUMBER: EMBL / AI072435
  ref <309>: DATABASE ENTRY DATE: 2000-03-03
tttttttttttttttttggatttgcaaatacagtttattttacagaaattcaacattataaacagcaggcacctcaacgtcggtatcgccgcaacttcaattaccgacgcagacgcccagagaaccctaaaccacaagatggcaaagagacaaaagcagccgatccaccagctgagaattcgtccgctcccgaggctgagcagggcggggctgagtaaatgccggcttaccatctctaccatcatccggtttggtcatccaacaagaagaaatgaatatgaaattccagcaataagaaatgaacaaagattggagctgaagaccttaagtgcttgctttttgcccgttgaccagatccactagaactgtctgcattatctatgcagcatggggtttttattatttttacctaaagatgtctctttttggtaatgacaaacgtgttttttaaaaaaaaaaaaaaaaaacctttgcggcccctcgtgccg

SEQ ID NO: 14545 - protein, 322 aa, Rattus norvegicus; identical to SEQ ID NO: 7178
  ref <308>: DATABASE ACCESSION NUMBER: PIR / A23677
  ref <309>: DATABASE ENTRY DATE: 1999-06-22

SEQ ID NO: 14546 - DNA, 1481 bp, Homo sapiens
  ref <308>: DATABASE ACCESSION NUMBER: EMBL / J03827
  ref <309>: DATABASE ENTRY DATE: 1999-07-02
ccgggagcggagagcggaccccagagagccctgagcagccccaccgccgccgccggcctagttaccatcacaccccgggaggagccgcagctgccgcagccggccccagtcaccatcaccgcaaccatgagcagcgaggccgagacccagcagccgcccgccgccccccccgccgcccccgccctcagcgccgccgacaccaagcccggcactacgggcagcggcgcagggagcggtggcccgggcggcctcacatcggcggcgcctgccggcggggacaagaaggtcatcgcaacgaaggttttgggaacagtaaaatggttcaatgtaaggaacggatatggtttcatcaacaggaatgacaccaaggaagatgtatttgtacaccagactgccataaagaagaataaccccaggaagtaccttcgcagtgtaggagatggagagactgtggagtttgatgttgttgaaggagaaaagggtgaggaggcagcaaatgttacaggtcctggtggtgttccagttcaaggcagtaaatatgcagcagaccgtaaccattatagacgctatccacgtcgtaggggtcctccacgcaattaccagcaaaattaccagaatagtgagagtggggaaaagaacgagggatcggagagtgctcccgaaggccaggcccaacaacgccggccctaccgcaggcgaaggttcccaccttactacatgcggagaccctatgggcgtcgaccacagtattccaaccctcctgtgcagggagaagtgatggagggtgctgacaaccagggtgcaggagaacaaggtagaccagtgaggcagaatatgtatcggggatatagaccacgattccgcaggggccctcctcgccaaagacagcctagagaggacggcaatgaagaagataaagaaaatcaaggagatgagacccaaggtcagcagccacctcaacgtcggtaccgccgcaacttcaattaccgacgcagacgcccagaaaaccctaaaccacaagatggcaaagagacaaaagcagccgatccaccagctgagaattcccgctcccgaggctgagcagggcggggctgagtaaatgccggcttaccatctctaccatcatccggtttagtcatccaacaagaagaaatatgaaattccagcaataagaaatgaacaaaagattggagctgaagacctaaagtacttgctttttgccgtttgcaaccagataaatagaactatctgcattatctatgcagcatggggtttatattttactaagacgctctttggtatacaacggttttaaaagcctggttttctcaatacgccttaaaggttttaaattgtttcatatctggtcaagttgagatttttaagaacttcatttttaatttgtaataaaagtttacaacttgattttttcaaaaaagtcaacaaactgcaagcacctgttaataaaggtcttaaataat

SEQ ID NO: 14547 - protein, 318 aa, Homo sapiens
  misc_feature (1)..(318): Xaa=Unknown amino acid
MSSEAETQQPPAAPPAAPALSAADTKPGTTGSGAGSGGPGGLTSAAPAGGDKKVIATKVLGTVKWFNVRNGYGFINRNDTKEDVFVHQTAIKKNNPRKYLRSVGDGETVEFDVVEGEKGEEAANVTGPGGVPVQGSKYAADRNHYRRYPRRRGPPRNYQQNYQNSESGEKNEGSESAPEGQAQQRRPYRRRRFPPYYMRRPYGRRPQYSNPPVQGEVMEGADNQGAGEQGRPVRQNMYRGYRPRFRRGPPRQRQPREDGNEEDKENQGDETQGQQPPQRRYRRNFNYRRRRPENPKPQDGKETKAADPPAENSRSRGX

SEQ ID NO: 14548 - DNA, 488 bp, Rattus norvegicus; identical to SEQ ID NO: 6816
  ref <308>: DATABASE ACCESSION NUMBER: EMBL / AI104389
  ref <309>: DATABASE ENTRY DATE: 2000-03-03

SEQ ID NO: 14549 - protein, 262 aa, Rattus norvegicus; identical to SEQ ID NO: 13402
  ref <308>: DATABASE ACCESSION NUMBER: SWISS-Prot / 1TOH
  ref <309>: DATABASE ENTRY DATE: 2002-10-01

SEQ ID NO: 14550 - DNA, 111 bp, Homo sapiens; identical to SEQ ID NO: 13403
  ref <308>: DATABASE ACCESSION NUMBER: EMBL / M20912
  ref <309>: DATABASE ENTRY DATE: 2000-03-04

SEQ ID NO: 14551 - DNA, 458 bp, Rattus norvegicus; identical to SEQ ID NO: 13438
  ref <308>: DATABASE ACCESSION NUMBER: EMBL / AI175900
  ref <309>: DATABASE ENTRY DATE: 2000-03-03

SEQ ID NO: 14552 - protein, 441 aa, Rattus norvegicus; identical to SEQ ID NO: 13439
  ref <308>: DATABASE ACCESSION NUMBER: SWISS-Prot / P41156
  ref <309>: DATABASE ENTRY DATE: 2002-06-15

SEQ ID NO: 14553 - DNA, 1450 bp, Homo sapiens; identical to SEQ ID NO: 13440
  ref <308>: DATABASE ACCESSION NUMBER: EMBL / J04101
  ref <309>: DATABASE ENTRY DATE: 2000-03-04

SEQ ID NO: 14554 - protein, 441 aa, Homo sapiens; identical to SEQ ID NO: 13441
  ref <308>: DATABASE ACCESSION NUMBER: SWISS-Prot / TVHUET
  ref <309>: DATABASE ENTRY DATE: 2002-06-15

SEQ ID NO: 14555 - DNA, 472 bp, Rattus norvegicus
  ref <308>: DATABASE ACCESSION NUMBER: EMBL / AI178012
  ref <309>: DATABASE ENTRY DATE: 1999-01-22
aaaagggaacagaatatatattaatatattacataccatgtgtatgcataaaacacatttccataaatccgagggtcatcagaaaggataagatgtggaaagaaagcttgtatactgaaaacacttaactcagagaccgtatcacaccagtaaggctcttaacaactagtttattgtaaaatagacaaactattatagaaaataggaacatagcaatctgaatgtatagttttaaccagtacaaaaacaaaagcagggtctgcagttttaagaaatcttaatagaggatctctgaaaattcctatgattctgtcactaattctaacttgaacttactagcaaaagacctagaagtatggtcagcccttgacctaaacctaactaacctgtgtgatggccatgcaaaactcaatgaagaaatggggggagctgtctacggcctttgtcatcgagataactatcacctcgtgcc

SEQ ID NO: 14556 - protein, 899 aa, Rattus norvegicus; identical to SEQ ID NO: 1846
  ref <308>: DATABASE ACCESSION NUMBER: SWISS-Prot / P33568
  ref <309>: DATABASE ENTRY DATE: 2002-06-15

SEQ ID NO: 14557 - DNA, 4740 bp, Homo sapiens
  ref <308>: DATABASE ACCESSION NUMBER: Refseq / NM_000321
  ref <309>: DATABASE ENTRY DATE: 2000-10-31
ttccggtttttctcaggggacgttgaaattatttttgtaacgggagtcgggagaggacggggcgtgccccgcgtgcgcgcgcgtcgtcctccccggcgctcctccacagctcgctggctcccgccgcggaaaggcgtcatgccgcccaaaaccccccgaaaaacggccgccaccgccgccgctgccgccgcggaacccccggcaccgccgccgccgccccctcctgaggaggacccagagcaggacagcggcccggaggacctgcctctcgtcaggcttgagtttgaagaaacagaagaacctgattttactgcattatgtcagaaattaaagataccagatcatgtcagagagagagcttggttaacttgggagaaagtttcatctgtggatggagtattgggaggttatattcaaaagaaaaaggaactgtggggaatctgtatctttattgcacgagttgacctagatgagatgtcgttcactttactgagctacagaaaaacatacgaaatcagtgtccataaattctttaacttactaaaagaaattgataccagtaccaaagttgataatgctatgtcaagactgttgaagaagtatgatgtattgtttgcactcttcagcaaattggaaaggacatgtgaacttatatatttgacacaacccagcagttcgatatctactgaaataaattctgcattggtgctaaaagtttcttggatcacatttttattagctaaaggggaagtattacaaatggaagatgatctggtgatttcatttcagttaatgctatgtgtccttgactattttattaaactctcacctcccatgttgctcaaagaaccatataaaacagctgttatacccattaatggttcacctcgaacacccaggcgaggtcagaacaggagtgcacggatagcaaaacaactagaaaatgatacaagaattattgaagttctctgtaaagaacatgaatgtaatatagatgaggtgaaaaatgtttatttcaaaaattttataccttttatgaattctcttggacttgtaacatctaatggacttccagaggttgaaaatctttctaaacgatacgaagaaatttatcttaaaaataaagatctagatcgaagattatttttggatcatgataaaactcttcagactgattctatagacagttttgaaacacagagaacaccacgaaaaagtaaccttgatgaagaggtgaatataattcctccacacactccagttaggactgttatgaacactatccaacaattaatgatgattttaaattctgcaagtgatcaaccttcagaaaatctgatttcctattttaacaactgcacagtgaatccaaaagaaagtatactgaaaagagtgaaggatataggatacatctttaaagagaaatttgctaaagctgtgggacagggttgtgtcgaaattggatcacagcgatacaaacttggagttcgcttgtattaccgagtaatggaatccatgcttaaatcagaagaagaacgattatccattcaaaattttagcaaacttctgaatgacaacatttttcatatgtctttattggcgtgcgctcttgaggttgtaatggccacatatagcagaagtacatctcagaatcttgattctggaacagatttgtctttcccatggattctgaatgtgcttaatttaaaagcctttgatttttacaaagtgatcgaaagttttatcaaagcagaaggcaacttgacaagagaaatgataaaacatttagaacgatgtgaacatcgaatcatggaatcccttgcatggctctcagattcacctttatttgatcttattaaacaatcaaaggaccgagaaggaccaactgatcaccttgaatctgcttgtcctcttaatcttcctctccagaataatcacactgcagcagatatgtatctttctcctgtaagatctccaaagaaaaaaggttcaactacgcgtgtaaattctactgcaaatgcagagacacaagcaacctcagccttccagacccagaagccattgaaatctacctctctttcactgttttataaaaaagtgtatcggctagcctatctccggctaaatacactttgtgaacgccttctgtctgagcacccagaattagaacatatcatctggacccttttccagcacaccctgcagaatgagtatgaactcatgagagacaggcatttggaccaaattatgatgtgttccatgtatggcatatgcaaagtgaagaatatagaccttaaattcaaaatcattgtaacagcatacaaggatcttcctcatgctgttcaggagacattcaaacgtgttttgatcaaagaagaggagtatgattctattatagtattctataactcggtcttcatgcagagactgaaaacaaatattttgcagtatgcttccaccaggccccctaccttgtcaccaatacctcacattcctcgaagcccttacaagtttcctagttcacccttacggattcctggagggaacatctatatttcacccctgaagagtccatataaaatttcagaaggtctgccaacaccaacaaaaatgactccaagatcaagaatcttagtatcaattggtgaatcattcgggacttctgagaagttccagaaaataaatcagatggtatgtaacagcgaccgtgtgctcaaaagaagtgctgaaggaagcaaccctcctaaaccactgaaaaaactacgctttgatattgaaggatcagatgaagcagatggaagtaaacatctcccaggagagtccaaatttcagcagaaactggcagaaatgacttctactcgaacacgaatgcaaaagcagaaaatgaatgatagcatggatacctcaaacaaggaagagaaatgaggatctcaggaccttggtggacactgtgtacacctctggattcattgtctctcacagatgtgactgtataactttcccaggttctgtttatggccacatttaatatcttcagctctttttgtggatataaaatgtgcagatgcaattgtttgggtgagtcctaagccacttgaaatgttagtcattgttatttatacaagattgaaaatcttgtgtaaatcctgccatttaaaaagttgtagcagattgtttcctcttccaaagtaaaattgctgtgctttatggatagtaagaatggccctagagtgggagtcctgataacccaggcctgtctgactactttgccttcttttgtagcatataggtgatgtttgctcttgtttttattaatttatatgtatatttttttaatttaacatgaacacccttagaaaatgtgtcctatctatcttccaaatgcaatttgattgactgcccattcaccaaaattatcctgaactcttctgcaaaaatggatattattagaaattagaaaaaaattactaattttacacattagattttattttactattggaatctgatatactgtgtgcttgttttataaaattttgcttttaattaaataaaagctggaagcaaagtataaccatatgatactatcatactactgaaacagatttcatacctcagaatgtaaaagaacttactgattattttcttcatccaacttatgtttttaaatgaggattattgatagtactcttggtttttataccattcagatcactgaatttataaagtacccatctagtacttgaaaaagtaaagtgttctgccagatcttaggtatagaggaccctaacacagtatatcccaagtgcactttctaatgtttctgggtcctgaagaattaagatacaaattaattttactccataaacagactgttaattataggagccttaatttttttttcatagagatttgtctaattgcatctcaaaattattctgccctccttaatttgggaaggtttgtgttttctctggaatggtacatgtcttccatgtatcttttgaactggcaattgtctatttatcttttatttttttaagtcagtatggtctaacactggcatgttcaaagccacattatttctagtccaaaattacaagtaatcaagggtcattatgggttaggcattaatgtttctatctgattttgtgcaaaagcttcaaattaaaacagctgcattagaaaaagaggcgcttctcccctcccctacacctaaaggtgtatttaaactatcttgtgtgattaacttatttagagatgctgtaacttaaaataggggatatttaaggtagcttcagctagcttttaggaaaatcactttgtctaactcagaattatttttaaaaagaaatctggtcttgttagaaaacaaaattttattttgtgctcatttaagtttcaaacttactattttgacagttattttgataacaatgacactagaaaacttgactccatttcatcattgtttctgcatgaatatcatacaaatcagttagtttttaggtcaagggcttactatttctgggtcttttgctactaagttcacattagaattagtgccagaattttaggaacttcagagatcgtgtattgagatttcttaaataatgcttcagatattattgctttattgcttttttgtattggttaaaactgtacatttaaaattgctatgttactattttctacaattaatagtttgtctattttaaaataaattagttgttaagagtc

SEQ ID NO: 14558 - protein, 928 aa, Homo sapiens
  ref <308>: DATABASE ACCESSION NUMBER: Refseq / NP_000312
  ref <309>: DATABASE ENTRY DATE: 2000-10-31
MPPKTPRKTAATAAAAAAEPPAPPPPPPPEEDPEQDSGPEDLPLVRLEFEETEEPDFTALCQKLKIPDHVRERAWLTWEKVSSVDGVLGGYIQKKKELWGICIFIARVDLDEMSFTLLSYRKTYEISVHKFFNLLKEIDTSTKVDNAMSRLLKKYDVLFALFSKLERTCELIYLTQPSSSISTEINSALVLKVSWITFLLAKGEVLQMEDDLVISFQLMLCVLDYFIKLSPPMLLKEPYKTAVIPINGSPRTPRRGQNRSARIAKQLENDTRIIEVLCKEHECNIDEVKNVYFKNFIPFMNSLGLVTSNGLPEVENLSKRYEEIYLKNKDLDRRLFLDHDKTLQTDSIDSFETQRTPRKSNLDEEVNIIPPHTPVRTVMNTIQQLMMILNSASDQPSENLISYFNNCTVNPKESILKRVKDIGYIFKEKFAKAVGQGCVEIGSQRYKLGVRLYYRVMESMLKSEEERLSIQNFSKLLNDNIFHMSLLACALEVVMATYSRSTSQNLDSGTDLSFPWILNVLNLKAFDFYKVIESFIKAEGNLTREMIKHLERCEHRIMESLAWLSDSPLFDLIKQSKDREGPTDHLESACPLNLPLQNNHTAADMYLSPVRSPKKKGSTTRVNSTANAETQATSAFQTQKPLKSTSLSLFYKKVYRLAYLRLNTLCERLLSEHPELEHIIWTLFQHTLQNEYELMRDRHLDQIMMCSMYGICKVKNIDLKFKIIVTAYKDLPHAVQETFKRVLIKEEEYDSIIVFYNSVFMQRLKTNILQYASTRPPTLSPIPHIPRSPYKFPSSPLRIPGGNIYISPLKSPYKISEGLPTPTKMTPRSRILVSIGESFGTSEKFQKINQMVCNSDRVLKRSAEGSNPPKPLKKLRFDIEGSDEADGSKHLPGESKFQQKLAEMTSTRTRMQKQKMNDSMDTSNKEEK

SEQ ID NO: 14559 - DNA, 566 bp, Rattus norvegicus; identical to SEQ ID NO: 13490
  ref <308>: DATABASE ACCESSION NUMBER: EMBL / AI232256
  ref <309>: DATABASE ENTRY DATE: 2000-03-03

SEQ ID NO: 14560 - protein, 146 aa, Rattus norvegicus; identical to SEQ ID NO: 10298
  ref <308>: DATABASE ACCESSION NUMBER: SWISS-Prot / P04166
  ref <309>: DATABASE ENTRY DATE: 2002-06-15

SEQ ID NO: 14561 - DNA, 749 bp, Homo sapiens; identical to SEQ ID NO: 10299
  ref <308>: DATABASE ACCESSION NUMBER: EMBL / AB009282
  ref <309>: DATABASE ENTRY DATE: 1997-12-05

SEQ ID NO: 14562 - protein, 146 aa, Homo sapiens; identical to SEQ ID NO: 10300
  ref <308>: DATABASE ACCESSION NUMBER: SWISS-Prot / O43169
  ref <309>: DATABASE ENTRY DATE: 2002-06-15

SEQ ID NO: 14563 - DNA, 530 bp, Rattus norvegicus
  ref <308>: DATABASE ACCESSION NUMBER: EMBL / AI638962
  ref <309>: DATABASE ENTRY DATE: 2000-03-04
ttccactatcgagtggacatgtttgcctcctgtaattccatagtccagtggagtgatttaaaattccaggcaggttgaatttccatggcctgactaacatatacgtagcttatccccagaggcttctttgtctgaacaaaaggaactcacagttcttgctcaccaactcatgcagtaccatggtcctaatttatttgtacaactattctgtgaattatatgaatcaaccacaatgaactgaaagaagaaataggacttccaaaatcaggaaggtcagtgcttcagctgttcctttccaatctcaatggaaaatgggttagatgccctggaaagtcgggtagtgtttgtgaatttcttgaagtgtgtggcccctttcaaaatgttgcaatgtttaagctatgaacactcagattcctgcccccccccacatgcatttatatgcacggaagatcaggaatctacattttagcattgacctgcttcttatttatactaagacctttaatattaaaactggtagctgagagggt

SEQ ID NO: 14564 - DNA, 582 bp, Rattus norvegicus
  ref <308>: DATABASE ACCESSION NUMBER: EMBL / AI638987
  ref <309>: DATABASE ENTRY DATE: 2000-03-04
ttaagagaaagcatgttgatgaacctgtaaaaatattgtgctgtaagccacagatgtctcctatgcctcaaacatctctaatgtgtgaggaacaggtctattttcccctctgtgctaattattcttacaaacagttatttgagaaagggcatgggcagaattatacagacagattgccataaactaggcagattgagttagaagcttataagtactttctgcttgttactatcatatcttttgaaacaaagtaagtgtcatggtctttaagagtagaaaaagaaaaatggtggctgcagagatggctccatgggtaagagcactggctgctcttccagaggacccaggttcaattcctagcacccatatgtgagctcacaactgtaactccaattccaggaaatctgaaaccctcacacatacacacatgagcaggcaggacacagcgttcataaaataaaaataaatgtaataaaaggaaataaaaataaaaagaaagatgtgataagtgtactgagaagtagaagtaaaaagtgcttcagagagtgaggacatgactatgtggaaagatgtgaagtttga

SEQ ID NO: 14565 - DNA, 415 bp, Rattus norvegicus
  ref <308>: DATABASE ACCESSION NUMBER: EMBL / AI638988
  ref <309>: DATABASE ENTRY DATE: 2000-03-04
ttccgtccccctcccagctcagctaatccgacttccccgtccctgcagctcctggagtccggaaggttgacctaaaggacagacacagtcccacaggttttccggagggttagtgagtccatcaaaagagccagaagagcagtttccgggctccctcccgcggattctggttaccagttctgccgccccctggtctgttgccatggaaaccaaaccttccaggcgactttgactttgcgtaagaagggtggtggtgtgtgaggttgctgaagggagagctgggttttctcggagcctggtgttgaaagggcggggtaccgagtgcctgggttctattctgggcatggaagcagacagtagggcaaagagcagctgtggctggtccccagattggtatgtgggcatcagaagatga

SEQ ID NO: 14566 - DNA, 455 bp, Rattus norvegicus
  misc_feature (1)..(455): n=a, c, g or t
  ref <308>: DATABASE ACCESSION NUMBER: EMBL / AI639074
  ref <309>: DATABASE ENTRY DATE: 2000-03-04
ttcttcggttttacccaaaaaactttttttnnaaacacattaaagatgttatttaccataatcaagtacaatttattccaggcttttagtggtgattcaaaaaggaaaatttctttaacataatcaaccttttaaacaaattgaaaaaaaaatacatgatcatttcactagacatttgttccatattgcctataattctttacactaaattcccaaattgactgggaattacgttttagaattcaagtttccaaatattttgttacaggttcagatttttaaggatagagagggtccctgccatcattttgatgaacattcaaatattatactatgcattcatcattaaaaatgttttagttgtaacaatcagaatattcatttaccttaaccaacagtttccacaagaaagaatccttaaattaattaacatttcattgattattatatctatg

SEQ ID NO: 14567 - DNA, 530 bp, Rattus norvegicus
  ref <308>: DATABASE ACCESSION NUMBER: EMBL / AI639112
  ref <309>: DATABASE ENTRY DATE: 2000-03-04
ttattaagtttataaactgccaagaatttattttgcaaaggtattaaatgtctccagaaaaaaagtcaaatatgcatgattacaaaaatcttttcctgatccctaaccccaaattttcctctttggaggcagccatagtattaggcatttgtcttcctgtgacagatttatagagacctacatgtaattctgtctttaacccacagtacggttaaatcacatcaccttttacttttctcattgacattgtcatctcagcaacacgcaaacactgtgttctttttaactactactgcattccatgatttatttaggtaagtgataaacatttacctgtttctagccttactttcatacaaatacttcagggaacattcttttgcctgttgtataatggccatcagatacaatttaggctcagagggtatgtaaagttttatattaaaaataggtacagatgtttacaggagagtgcttgcttctccatttccatcccaacagttagccaacattttatgtgtcaatctaaa

SEQ ID NO: 14568 - DNA, 379 bp, Rattus norvegicus
  ref <308>: DATABASE ACCESSION NUMBER: EMBL / AI639195
  ref <309>: DATABASE ENTRY DATE: 2000-03-04
ttggtttggggggcaaaaaaaaaggtttaaaaaaataaaaggggggggggggggaagggggaaaaaaaaaacaaaaatttcccctttggaaaagggaaaaaaaagggggtcaaggaaataaaaaaaaattttcatgattgggcgaaacctcattttcgaattaagaaaaaaaaccatcttgatgtaaagaaaaaaaaaatatttttggagaattcgggggatttaaattaaaaaaagattttgtgggggaaaaaaaaaaaaattttccacccaaaggtaatagaccttctcatgctgggggcaaacaaaggggggggaaaaaaaaaaaaaggggggacttgtgttttacaaaaaaaaaaaaaaggacaaaggggaaaaa

SEQ ID NO: 14569 - DNA, 510 bp, Rattus norvegicus
  ref <308>: DATABASE ACCESSION NUMBER: EMBL / AI639200
  ref <309>: DATABASE ENTRY DATE: 2000-03-04
ttcttgactatggctgtgatatgagcaactgtttcaagtctatcgtagactgtgacctagaattgtgagctaaaataagctctctgtaaggtactttttgtcagggtatttatcacagccacagaagtaatactagggcaattgagagctccgggaatgaagcctccataaaacgttagttgtctatgatgggttggtcttcccactgatgcagttatctttatgtaatccatgttcctataactcatcccaataaactcattggctcaccaagctagacttgggtggaatcacttcttcgctgttttctcagtgccctctccggggtgaacaagtgttgtctttccaggaaaagccaagcaacaggcattctccttcataaccataatatagccatcaaatataagaactattatttcaatactaatttaatatgcaagctatttttgactcatctcacttgcactaataaaatattttatcattttcctagtgttttattatgaacat

SEQ ID NO: 14570 - DNA, 556 bp, Rattus norvegicus
  ref <308>: DATABASE ACCESSION NUMBER: EMBL / AI639217
  ref <309>: DATABASE ENTRY DATE: 2000-03-04
ttggttttttgagacgaggttatctctacacagccctggctgtcctggaactcactaactaagctggccttaaactcagacatacactggcctctgcctcagtgctgggattaaagatgtgctaccatatcctgctcaaaacactgggtcttaccactcttacagtcttcacaacaagagtcaaaaagagtcagtctgtctctgtctctctcctcactgagtaacagagatggatgaacctaccaggcagcccatgctagctgggttggctgaaagcttgtaccaatgctcctgcctcctgagtgtcgggattatacgcatgagtcgatcacagctgcctggtttagtcccacttttacaaatgctattcagaaagtaagcttgcccaagatctcctggctcgttactgtacttcccaggttggtcctagaacaaagctaacacgccaaaccctaagagtttcccagcatcggcctcactcagtgttcttccactggacctctatcattaggcgaaagtaaaaatctacacacactgaattccgggctgagataac

SEQ ID NO: 14571 - DNA, 424 bp, Rattus norvegicus
  ref <308>: DATABASE ACCESSION NUMBER: EMBL / AI639219
  ref <309>: DATABASE ENTRY DATE: 2000-03-04
ttatttcattttttgttttttaaaaaaaaaaaccaaattttaattttgaaccaaaacaacaaaaattaattttaaaccaaagcgggccccggggaaaattttatggcctaacccacccttccaagaagggaaaaagaaaaaccgcctgaaacaaaccagacatttgtatttaaaaccccgcctaacctccaaaaaaagggccgccccacttgaagaccccctgcccggatttttcttggggaaggagaatcaccaacttagcccaaagctgggaaaaacaccggggtgggggggccccaaaaagccacccccccactttttttttcggaaaacaccttcaccaaaatgaaataccaagactttttccaactggaaaaattaaaaagcgcatggccgggccctctttctaaaacaacaaaacaat

SEQ ID NO: 14572 - DNA, 506 bp, Rattus norvegicus
  misc_feature (1)..(506): n=a, c, g or t
  ref <308>: DATABASE ACCESSION NUMBER: EMBL / AI639225
  ref <309>: DATABASE ENTRY DATE: 2000-03-04
ttctttctttctttctttctttctttctttctttcttttttaaatcccttggtttttcaagacaagatttcttcttcgtgtagccctggctgtcctggagctcactctgcagaccaggctggcctggaactcagagatctgcctgcctctgccttctcaacatggccctgatgatgtatggaaatttcaaagaacaagtttaattttaaaacactgagctacaaaaagttcccagatgggaggattctctggaaccagagtcttgtgaatagaggactagatccgcctaaggtgcaatgtgccccaggctcagccattctcctatctgatgtcattcacagtcctgctcacaggaaggacactcagcctcgggccatactcagaaagccatctaccttgctggactacctacttgctgcctacagccaggctgagccctcaccagccccttctccctcacacccgggctttactgtatcgaaggaacaccatcatanacaagggaa

SEQ ID NO: 14573 - DNA, 516 bp, Rattus norvegicus; identical to SEQ ID NO: 13045
  ref <308>: DATABASE ACCESSION NUMBER: EMBL / AI639247
  ref <309>: DATABASE ENTRY DATE: 2000-03-04

SEQ ID NO: 14574 - DNA, 3957 bp, Homo sapiens; identical to SEQ ID NO: 13046
  ref <308>: DATABASE ACCESSION NUMBER: EMBL / AY009106
  ref <309>: DATABASE ENTRY DATE: 2001-01-22

SEQ ID NO: 14575 - protein, 1252 aa, Homo sapiens; identical to SEQ ID NO: 13047
  ref <308>: DATABASE ACCESSION NUMBER: SWISS-Prot / AAG49397
  ref <309>: DATABASE ENTRY DATE: 2003-02-01

SEQ ID NO: 14576 - DNA, 381 bp, Rattus norvegicus; identical to SEQ ID NO: 7420
  ref <308>: DATABASE ACCESSION NUMBER: EMBL / AI639315
  ref <309>: DATABASE ENTRY DATE: 2000-03-04

SEQ ID NO: 14577 - DNA, 439 bp, Rattus norvegicus
  ref <308>: DATABASE ACCESSION NUMBER: EMBL / AI639362
  ref <309>: DATABASE ENTRY DATE: 2000-03-04
ttaacttttaaatgtatgtttatttctctgtgtgtaaccctggaggtataagaggacatccaatctcctggacctggagttgtgggtggttatgaatcatctgatgtgtgctagaagtgaagtccaggtctcagcgagaccagcaagtattccttatcattgggccatgcccaaggccctcagatgttaaaaattaagtttctttcactgttaataactgtattccagcaagaaagaaaatgaatgaaaacaagaaaattgactggagcagtgatgttcaaacgttgccaagttcaagactgatgtggttttgtcaaataagactggggtcaagactaagagactgtcgagagacaacttggggagggctataggacatcaaagtaggctctacgaacatagagagttttgctatatgtttgagacaggttcttacaac

SEQ ID NO: 14578 - DNA, 550 bp, Rattus norvegicus
  ref <308>: DATABASE ACCESSION NUMBER: EMBL / AI639401
  ref <309>: DATABASE ENTRY DATE: 2000-03-04
ttatttgccaaacatttattgatttttaacagtcaaattatttgaacaagaatgtcttccaggtagtataaggcctcaaaggattgtgagctgataagtataatcaagagacctctagaattttgtcatctgtttatacatttccccctttccttcttccatcactctgtgagttcttattggacccaaacaagacaaatgtttacagaatcttgagtaggtttcctgcaaaccaaaatatacaaaagtagaaaaattctcaaacccaacaaaacttggggaaatggaacagaatgctacaattacagttttaaatttgagttgtttgagaagcactttgcttttgcttcatgagattgttttaggtgatgcaaaatataaaaatataatgccaaattataattgtctaccaagcatttctcttaataaagatttgtttcagttatgaattgatttcatatggtattttctgcataaatcattctccccctgcattatttgagggctgtaaaatttcagcctgctgatggaatctgtcacaattatgcaa

SEQ ID NO: 14579 - DNA, 9551 bp, Homo sapiens
  ref <308>: DATABASE ACCESSION NUMBER: EMBL / L09190
  ref <309>: DATABASE ENTRY DATE: 2000-03-04
aacaagccatttgtggagacagaggtggagctgggcttggttaggaatgaatcaggccattccacagagtgggtgtctccttcccaagttgctttccagggcacaattaaaacccctataaaaggcccagctcccagttacccagtacacttgcctgtggtgtcagcaagcactgtcgacttcttcctctggtgaagtgggtaagtcccattctgtgggatcgtggtcttctttatgattctccatttttatagctatttcagatgttgggatatggggggaggttccatgtgccagaaggtatcagtattgcagggataaataaactatcactaactctatcccatcttcttatggttggagccatcacttgaactgaagcatgacccttctccttgggctctgaactctatacttctgcacatcaaggatgatcatgtgtggctctgatagggttcatcttcctaaaaactgctatctcaaaagtttgccagccttctgttctcttttacattggttctacctaatatgggccatattcatacagtcacagcatttaaggtactggagttgagaagtacataaagaagtcagctagatgaacgactaccttatcccaccagcaaagccattccatgtattcttataacattgatctactgctggctaatgttttataaaaagccaagattccaatgatgcatttgggtttaacaaaaccaatatcattcacagttttctggattccgtttggtttagaaaggacctctcagaagctttcaatacttcaatatccgaatatcttactatatctgagttgaggcaggtaatatacagtctctgttttctgcatttgtgtatctgaatgttacatgccatcttttgactaggaagaagtactatttaatcttagaattgctgacttacaaattatattctataagagttcctaaatccctttatggactgtaatgttgaggaatcattcatattcccttttcattgttctattttctaccaatcgttttgctgacatggcctctatccactttaagatactctcaagtcttccttcaccttttggctttacctgtcctcttcgctcaactttaaaggaaggtgtgtagccatatataaaattttaatttctgcactcttctcttaattttctactctgaaatacggtggagagctggaagaaagacagaagaaaagggcatagataatccacattgggtggacaatcaaaagctgacaacaggatagtctgaagatgattccctggcttggaatttctcaggatcgctctttctctttctgatacaatattcaaatattaaagtgctctgaaagtccaggttgaaattaccgctataaattcaaattatttagggatctgcctgaaatagtgtgaatgaagccttcccaaaagcagaaacgggattttgattctggatcttattttattgttctaggtttacttgaacttgaaggaaagaaaaaaaaatgtctccacttctgagaagcatctgtgacatcactgaaattttcaatcagtatgtctctcatgattgtgatggagcagcattaactaagaaagacctgaagaacctccttgaaagggaatttggagctgtgcttcgggtaagaactaacaagaaaatgagatctattgacttgaggctatgagatttattctcagaggagaccagagcaaggaatggtggttttatattcattttacaccacaacaggtctacactacatcccccattcatttctgagtcaaaaggtacttacttgacattgtagtctgaataataaagtatttcatgtacttgatggcatggcatgtgaatgagctcttcatgggacattactacaaaagatgtcaaatcacactagacttggaggaacttggaggaacttaaatttgtttccaaatttcaaaactgagatcagcctgactctattaaatggtgctacccgtaaatgttttgttctgttttctaatatggaatagaaaccaaatcaagaatactggctgcttcagacagaaatggctactgcaaatcctcataaatttctattgtatctctctcaaggatgagttcattctttctcaattaaagcgaacttgtgttattctttcttgatgttgagtagctttgttaatttacacacaagttcacgatgctgttttgaatcttcacctcaggctctgctctaaggtgcgtaggcttacctgctatctacttgtgtctctcttcctgcttccttaggtttgatcagcactaaattacgagatgtaaaaatttcaaacgaatatatgctttaaagtgagggttcacattttacatggggacaaaacttgatacacactggacatttttctaattgctctgaatgtctcttgaatgtcagcatagcataaaatatatcatgtgtgaatataattttaccacctgtaaatagtgcattgtaaaatttttgtttttcaccattttatagagaccacatgaccctaagacggtagatctgatcctggaacttctggatcgtgacagtaatgggcgtgtcgatttcaacgaattcctcctatttattttcaaagtggctcaagcttgttactatgctctcggccaggccacgggactggatgaggagaagcgagcccggtgtgacggaaaggagagcctgttacaagatcgacggacagaagaagaccaaaggagattcgagccccgggacagacaactggaagaagaacctgggcaacgacgcaggcagaagaggcaggaacaggagagggagctagctgagggagaggagcaaagtgagaaacaagagcgacttgaacagcgcgacaggcagcgccgcgacgaggagctgtggcggcaaaggcaagaatggcaagaacgggaagagcgccgtgcagaggaagagcagctgcagagttgcaaaggtcacgaaactgaggagtttccagacgaagagcaactgcgaaggcgggagctgctggagctgaggaggaagggccgcgaggagaaacagcagcaaaggcgagagcgccaagacagagtgttccaggaggaagaagagaaagagtggaggaagcgcgagacagtgctccggaaggaagaagagaagttgcaggaagaggagccgcagcggcaaagagagctccaggaggaagaagagcagctacggaagctggagcggcaagagctgaggagggagcgccaggaggaagagcagcagcagcaaaggctgaggcgcgagcagcaactaaggcgcaagcaggaggaggagaggcgcgagcagcaggaggagaggcgcgagcagcaggagaggcgcgagcagcaggaggagaggcgcgagcagcagctgaggcgcgagcaggaggagaggcgcgagcagcagctgaggcgcgagcaggaggaggagaggcgcgagcagcagctgaggcgcgagcaggaggaggagaggcgcgagcagcagctgaggcgcgagcaggaggaggagaggcgcgagcagcagctgaggcgcgagcagcagctgaggcgcgagcagcagctgaggcgcgagcagcagctgaggcgcgagcagcagctgaggcgcgagcagcagctgaggcgcgagcagcagctgaggcgcgagcagcagctgaggcgcgagcagcagctgaggcgcgagcagcagctgaggcgcgagcaggaggaggagaggcacgagcagaagcacgagcaggagaggcgcgagcagcggctgaagcgcgagcaggaggagaggcgcgattggctgaagcgcgaggaggagacggagaggcacgagcaggagaggcgcaagcagcagctgaagcgcgaccaggaggaggagaggcgcgaacgttggctgaagctcgaggaggaggagaggcgcgagcagcaggagaggcgcgagcagcaactaaggcgggagcaagaggagaggcgcgagcagcggctgaagcgccaggaggaggaagagaggctccagcagcggttgaggagcgagcaacaactaagacgcgagcaggaggagaggctcgagcagctgctgaagcgcgaggaggagaagaggctcgagcaggagaggcgagagcagcggctgaagcgcgagcaggaggagaggcgcgatcagctgctgaagcgcgaggaggagaggcgccagcagcggctgaagcgcgagcaggaagagaggctcgagcagcgactgaagcgcgaggaggtggagagactcgagcaggaggagaggcgcgacgagcggctgaagcgcgaggagccggaggaagagaggcgccacgagctgctgaagagcgaggagcaggaggagaggcgccacgagcaactgaggcgcgagcagcaggaaaggcgcgagcagcggctgaagcgcgaggaggaggaagagaggctcgagcagcggctgaagcgcgagcatgaggaagagaggcgcgagcaggagctagctgaggaggagcaggaacaggcccgggagcggattaagagccgcatcccgaagtggcagtggcagctagaaagcgaggccgacgcacggcaaagcaaagtcttactcgaggccccgcaagcaggaagggcagaggcgccgcaagagcaggaggaaaagaggcggcgcgagagtgagctgcaatggcaggaggaggaacgggctcaccggcagcagcaggaagaggagcagcgccgggacttcacatggcagtggcaggcggaggaaaagagcgagaggggccgtcagaggctgtcggccaggcccccattgcgggagcagcgggagaggcagctgagggccgaggagcgccagcagcgggaacaacggtttctcccggaggaggaggagaaggagcagcgcggccgccagcgacgcgagagggagaaagagctgcagttcctggaggaagaggagcagctccagcggcgggagcgtgcccaacagctccaggaggaggaggacggcctccaggaggatcaggagaggaggcgacaggagcagcgccgcgaccaaaaatggaggtggcaactagaagaagaaaggaagagacgccgccacacgctgtacgccaagccagccctacaagagcagctgaggaaggaacagcagctgctgcaggaggaggaggaggagctacagagagaggagcgcgagaagagaaggcgccaagaacaggagagacaataccgcgaggaagagcagctgcagcaggaggaagagcagctgctgagagaggaacgggagaaaagaagacgccaggagcgggaaaggcaatatcggaaggataagaagctgcagcagaaggaagagcagctgctgggagaggaaccggagaagagaaggcgccaggagcgggagaaaaaataccgcgaggaagaggagttgcagcaggaggaagagcagctgctgagagaggaacgggagaagagaaggcgccaggagtgggagaggcagtaccgcaaaaaagacgagctgcagcaggaagaagagcagctgctgagagaggaacgggagaaaagaagactccaggagcgggagaggcaatatcgggaggaagaggagctgcagcaggaggaagagcagctgctgggagaggaacgggagacgagaaggcgccaggagctggagaggcaatatcggaaggaagaggagctgcagcaggaggaagagcagctgctgagagaggaaccggagaagagaaggcgccaggagcgggagaggcaatgtcgggaggaagaggagctgcagcaggaggaagagcagctgctgagagaggaacgggagaagagaaggcgccaggagctggagaggcaatatcgggaggaggaagagcttcagcgccagaaaaggaaacagcgataccgggatgaggatcagcgcagtgatctgaaatggcagtgggaaccagaaaaagaaaatgcagttcgtgataacaaggtttactgcaaaggcagagagaatgaacagttccggcagttggaagattcccaggtgcgcgacagacaatcccagcaagatctgcagcacctgctgggtgaacagcaagagagagatcgtgagcaagagaggaggcgctggcagcaggccaacaggcatttcccagaggaagaacagctggagcgagaagagcaaaaggaagccaaaaggcgcgacaggaagtcccaagaggaaaagcagttgctgagagaggaaagagaagagaagagacgccgtcaagagacagacagaaaattccgcgaggaggaacagctgctccaggaaagggaggaacagccgctgctccgccaagagcgtgacagaaaattccgcgaagaggaactgctccatcaggaacaagggagaaaattcctcgaggaggaacagcggctgcgcgaggaacgggagagaaaattccttaaggaggaacagcagctgcgcctcgaggagcgcgagcaactgcgtcaggaccgcgacagaaaattccgcgaggaggaacagcagctgagccgccaagagcgtgacagaaaattccgtgaagaggaacagcaggtgcgccgccaggaacgagagagaaaattcctggaggaggaacagcagctgcgccaggagcgtcacagaaaattccgcgaagaggaacagctgctccaggaaagggaagaacagcagctgcaccgccaagagcgtgacagaaaattcctggaggaggaacaacagctgcgccgccaagagcgtgacagaaaattccgcgaacaggaactgcgcagtcaggaaccagagagaaaattcctcgaggaggaacagcagctgcaccgccagcaacggcagagaaaattcctccaggaggaacagcagctgcgccgccaggagcgcgggcaacagcggcgtcaggaccgtgacagaaaattccgcgaggaggaacagctgcgccaggagagggaggaacagcagctgagccgccaagagcgtgacagaaaattccgtttagaggaacagaaagtgcgccgccaggaacaagagagaaaattcatggaggacgaacagcagctgcgccgccaggagggccaacaacagctgcgccaggaggacagaaaattccgcgaagacgaacagctgctccaggaaagggaagaacagcagctgcaccgccaagagcgtgacagaaaattcctcgaggaggaaccgcagctgcgccgccaggagcgcgaacaacagctgcgtcacgaccgcgacagaaaattccgtgaagaggaacagctgctccaggaaggggaggaacagcagctgcgccgccaagagcgtgacagaaaattccgcgaagaggaacagcagctccgccgtcaggaacgagagagaaaattcctccaggaggaacagcagctgcgccgccaggaactggagagaaaattccgtgaggaggaacagctgcgccaagaaacggagcaagagcagctgcgccgccaagaacgctacagaaaaatcctagaggaagagcagctccgtccggaaagggaagaacagcagctgcgccgccaggagcgcgacagaaaattccgcgaggaggaacagctccgccagggaagggaggaacagcagctgcgcagccaagagtctgacagaaaattccgcgaggaggaacagctacgccaggagagggaagaacagcagctccgcccccaacagcgtgacggaaagtatcgctgggaagaagagcagctccaacttgaggaacaagagcagaggctgcggcaggagcgagaccggcagtaccgggcggaggagcagtttgccacgcaggagaagagtcgtcgtgaggaacaagaactatggcaagaagaggagcagaaacgtcgccaggaacgggaaaggaaattacgggaagaacacatccgccgccagcagaaggaggaacagaggcaccgccaagtcggggagatacaatcccaagaagggaagggccatgggcggcttctggagcccggcactcatcagtttgccagtgtcccagtgcgctccagccctctctatgagtacatccaagagcagagatctcaataccgcccttaagtgatgttgccaatatcttgacacctgccaaagcttccagcacgggaaaatgagaaacactgggtaccaagtgataactcagatgtttctggttgtgggaaaactctctgatattagaatgtcttttcttccaaaatcttaaactacgctcattttacgcactttgtacttctgctttttattcttcctcaagtagttctttactgcaagatgtctttcttttgctctttgatgcagatgtggtgtgcatttaaaaaaaatataaatcatttaatttgtttaagaaattttgtttgaggaacatgttcatttattgctttcagaagtaacaagagtaataggatgatttgagattctaaacaatgggtcggtttgtttaatgactgacccatcttgtggaaagtgcagatacttttaatgttcaagttgctatttcttcttgaacctaaattgatcattgcctccaaacagcatttcatccttttgtggcatagttagcacaaattccaggtaactaaatttttataacccttgaatagtgcagggggagtgacctctgcataaaaacttcctgtaaaatcagcccattactggaagaaatatctgttaagaataggtttagctttgaagatttagaatttaaattagattttttttaaactcaactccacttaaacacataatctcatgaagaaataatgaggtatttagaatttaaatgagttcaaattttaaaactgtgtctgttgtagtctatagtgttcattctacttccccaagttttgatgagtttcagaatattatgaacctttgttaattttagcttgttagaaggaagctgctcagaatcccataaacatctgtcttactctagggccaataagagatcacatagagcatgttgggggtgtaaaagggaaaaatgtgtgaacataggggcaaatttctagaggccctttgacaagacccatttgcccacaatcatttgaggcctattgataataccttagatatattcttgttgaaataattggactgtgaaaaattaataataaatgtttggcaagtaactacttttgtctgttttaactctgcgtcaatcataacaagatctcattgtctggaaactaacacaagttcccaatcacataagggcattttgttacttatctatgtccaaatacgaaaaaagaggggagagaattctttgtttttccccaaccttttttttttttttttttttttttttttgcagttaggctgaactctatttccatccccacactgagattgccttccagagtgtttttgttcttgacccacagctttctatgccattcttgcagcgactcactggtcatgacaaatactggtgctcccaatatttgttaatatttcctttagagaatgcagcagcttcttcgtctctgatgtctgatgagccaatgatagaaaatggcctgaaacttcagatcctcgag

SEQ ID NO: 14580 - protein, 1898 aa, Homo sapiens
  ref <308>: DATABASE ACCESSION NUMBER: SWISS-Prot / AAA65582
  ref <309>: DATABASE ENTRY DATE: 2002-06-15
MSPLLRSICDITEIFNQYVSHDCDGAALTKKDLKNLLEREFGAVLRRPHDPKTVDLILELLDRDSNGRVDFNEFLLFIFKVAQACYYALGQATGLDEEKRARCDGKESLLQDRRTEEDQRRFEPRDRQLEEEPGQRRRQKRQEQERELAEGEEQSEKQERLEQRDRQRRDEELWRQRQEWQEREERRAEEEQLQSCKGHETEEFPDEEQLRRRELLELRRKGREEKQQQRRERQDRVFQEEEEKEWRKRETVLRKEEEKLQEEEPQRQRELQEEEEQLRKLERQELRRERQEEEQQQQRLRREQQLRRKQEEERREQQEERREQQERREQQEERREQQLRREQEERREQQLRREQEEERREQQLRREQEEERREQQLRREQEEERREQQLRREQQLRREQQLRREQQLRREQQLRREQQLRREQQLRREQQLRREQQLRREQQLRREQEEERHEQKHEQERREQRLKREQEERRDWLKREEETERHEQERRKQQLKRDQEEERRERWLKLEEEERREQQERREQQLRREQEERREQRLKRQEEEERLQQRLRSEQQLRREQEERLEQLLKREEEKRLEQERREQRLKREQEERRDQLLKREEERRQQRLKREQEERLEQRLKREEVERLEQEERRDERLKREEPEEERRHELLKSEEQEERRHEQLRREQQERREQRLKREEEEERLEQRLKREHEEERREQELAEEEQEQARERIKSRIPKWQWQLESEADARQSKVLLEAPQAGRAEAPQEQEEKRRRESELQWQEEERAHRQQQEEEQRRDFTWQWQAEEKSERGRQRLSARPPLREQRERQLRAEERQQREQRFLPEEEEKEQRGRQRREREKELQFLEEEEQLQRRERAQQLQEEEDGLQEDQERRRQEQRRDQKWRWQLEEERKRRRHTLYAKPALQEQLRKEQQLLQEEEEELQREEREKRRRQEQERQYREEEQLQQEEEQLLREEREKRRRQERERQYRKDKKLQQKEEQLLGEEPEKRRRQEREKKYREEEELQQEEEQLLREEREKRRRQEWERQYRKKDELQQEEEQLLREEREKRRLQERERQYREEEELQQEEEQLLGEERETRRRQELERQYRKEEELQQEEEQLLREEPEKRRRQERERQCREEEELQQEEEQLLREEREKRRRQELERQYREEEELQRQKRKQRYRDEDQRSDLKWQWEPEKENAVRDNKVYCKGRENEQFRQLEDSQVRDRQSQQDLQHLLGEQQERDREQERRRWQQANRHFPEEEQLEREEQKEAKRRDRKSQEEKQLLREEREEKRRRQETDRKFREEEQLLQEREEQPLLRQERDRKFREEELLHQEQGRKFLEEEQRLREERERKFLKEEQQLRLEEREQLRQDRDRKFREEEQQLSRQERDRKFREEEQQVRRQERERKFLEEEQQLRQERHRKFREEEQLLQEREEQQLHRQERDRKFLEEEQQLRRQERDRKFREQELRSQEPERKFLEEEQQLHRQQRQRKFLQEEQQLRRQERGQQRRQDRDRKFREEEQLRQEREEQQLSRQERDRKFRLEEQKVRRQEQERKFMEDEQQLRRQEGQQQLRQEDRKFREDEQLLQEREEQQLHRQERDRKFLEEEPQLRRQEREQQLRHDRDRKFREEEQLLQEGEEQQLRRQERDRKFREEEQQLRRQERERKFLQEEQQLRRQELERKFREEEQLRQETEQEQLRRQERYRKILEEEQLRPEREEQQLRRQERDRKFREEEQLRQGREEQQLRSQESDRKFREEEQLRQEREEQQLRPQQRDGKYRWEEEQLQLEEQEQRLRQERDRQYRAEEQFATQEKSRREEQELWQEEEQKRRQERERKLREEHIRRQQKEEQRHRQVGEIQSQEGKGHGRLLEPGTHQFASVPVRSSPLYEYIQEQRSQYRP

SEQ ID NO: 14581 - DNA, 252 bp, Rattus norvegicus
  ref <308>: DATABASE ACCESSION NUMBER: EMBL / AI639423
  ref <309>: DATABASE ENTRY DATE: 2000-03-04
ttaattaattaattaattttcaccaggggaataataagagcagatttattttttaaagggagccttccagcagttgaatggaaaattgattgtcctaaaatgaggtaattatgaagttttagtgagagattgtaagaaacaaaaaagagcaggagggaaatggagggaagcttgtgaaagaagttgcagcattgaagtttttgttttccacacacaaagtttggattaagttttggtgaccattaaaacagg

SEQ ID NO: 14582 - DNA, 267 bp, Rattus norvegicus; identical to SEQ ID NO: 13003
  ref <308>: DATABASE ACCESSION NUMBER: EMBL / AI639453
  ref <309>: DATABASE ENTRY DATE: 2000-03-04

SEQ ID NO: 14583 - DNA, 671 bp, Rattus norvegicus
  ref <308>: DATABASE ACCESSION NUMBER: Refseq / NM_031669
  ref <309>: DATABASE ENTRY DATE: 2002-11-05
agaggaccaggcacctgaaccctgggatctgcagtttctccattctcctgagctagctcctcagcaccgaaaggaagcccctgtcatgaagaggtttctcctggccacctgtctggtggctgtgctgctgtgggaggcaggtgcaattccagcacaccaggtccctgtcaagaccaaaggcaaacatgtgttccctgaacaggaaacagagaaggcctggggtaccagagccatggaacctcttgaaaaggatgaccagctgagggcactgcttcctgtacccaagcagaagcttgcagccactgaggaaaagcattcagataccatgacctgggtggaaactaaggacatcctgagccgttttcggaatcctcttcagggtccagaactggatcttgacagcatataccatcccatgtctgaggatgtccagaatgaagaagtgccccagtctaggcccatcctatatcgtcaggtgctgcacggaccagaggaggaccttgaccacatctcccactctctggaggattctggagagccctaaccgttctcctactcctgtcctcaggtctaggctgctgtgaccattgattctcccaagttagaaaaaaaattaaacatttgaaaattggtggaaaaaaaaaaaaaaaaaaaaaaaaaaaaaaaaaaaa

SEQ ID NO: 14584 - protein, 152 aa, Rattus norvegicus
  ref <308>: DATABASE ACCESSION NUMBER: Refseq / NP_113857
  ref <309>: DATABASE ENTRY DATE: 2002-11-05
MKRFLLATCLVAVLLWEAGAIPAHQVPVKTKGKHVFPEQETEKAWGTRAMEPLEKDDQLRALLPVPKQKLAATEEKHSDTMTWVETKDILSRFRNPLQGPELDLDSIYHPMSEDVQNEEVPQSRPILYRQVLHGPEEDLDHISHSLEDSGEP

SEQ ID NO: 14585 - DNA, 4194 bp, Rattus norvegicus; identical to SEQ ID NO: 12187
  ref <308>: DATABASE ACCESSION NUMBER: Refseq / NM_019349
  ref <309>: DATABASE ENTRY DATE: 2000-11-01

SEQ ID NO: 14586 - protein, 1206 aa, Rattus norvegicus; identical to SEQ ID NO: 12188
  ref <308>: DATABASE ACCESSION NUMBER: Refseq / NP_062222
  ref <309>: DATABASE ENTRY DATE: 2000-11-01

SEQ ID NO: 14587 - DNA, 5629 bp, Homo sapiens
  ref <308>: DATABASE ACCESSION NUMBER: EMBL / AF273048
  ref <309>: DATABASE ENTRY DATE: 2001-01-18
cttaagtgcaaggaactctgtgttgggaggaaaaatgtccttcttcaatttccgtaagatcttcaagttggggagcgagaagaagaagaagcagtacgaacacgtgaagagggacctgaaccccgaagacttttgggagattataggagaactgggcgacggagcctttgggaaagtgtacaaggcccagaataaagagaccagtgttttagctgctgcaaaagtgattgacactaaatctgaagaagaacttgaagattacatggtagagattgacatattagcatcttgtgatcacccaaatatagtcaagcttctagatgccttctattatgagaacaatctttggatcctcattgaattttgtgcaggtggagcagtagatgctgtgatgcttgaacttgagagaccattaactgagtcccaaatacaagtagtttgcaagcagactttagatgcattgaactacttacatgataataagatcatccacagagatctgaaggctggcaacattctctttaccttagatggagatatcaaattggcggattttggagtatcagctaaaaacacgaggacaattcaaagaagagattcctttattggtacaccatattggatggctcctgaagtagtcatgtgtgaaacatctaaggacagaccctatgactacaaagctgatgtttggtccctgggtatcactttaatagaaatggctgagatagaaccacctcatcatgaattaaatccaatgcgagtgctgctaaaaatagcaaaatctgagccacctacattagcacagccatccagatggtcttcaaattttaaggactttctaaagaaatgcttagaaaagaatgtggatgccaggtggactacatctcagctgctgcagcatccctttgttactgttgattccaacaaacccatccgagaattgattgcagaggcgaaggctgaagtaacagaagaagttgaagatggcaaagaggaagatgaagaggaggaaacagaaaattctctgccaatacctgcaagtaagcgtgcatcttctgaccttagtatcgccagctctgaagaagataaactttcacaaaatgcttgtattttggagtctgtctcagaaaaaacagaacgtagtaactctgaagataaactcaacagcaaaattcttaatgaaaaacccaccactgatgaacctgaaaaggctgtggaggatattaatgaacatattaccgatgctcagttagaagcaatgactgaactccatgacagaacagcagtaatcaaggagaatgaaagagagaagaggcccaagcttgaaaatctgcctgacacagaagaccaagaaactgtggacattaattcagtcagtgaaggaaaagagaataatataatgataaccttagaaacaaatattgaacataatctaaaatctgaggaagaaaaggatcaggaaaagcaacagatgtttgaaaataagcttataaaatctgaagaaattaaagatactattttgcaaacagtagatttagtttctcaagagactggagaaaaagaggcaaatattcaggcagttgatagtgaagttgggcttacaaaggaagacacccaagagaaattgggggaagacgacaaaactcaaaaagatgtgatcagcaatacaagtgatgtgataggaacatgtgaggcagcagatgtggctcagaaagtggatgaagacagtgctgaggatacgcagagtaatgatgggaaagaagtggtcgaagtaggccagaaattaattaataagcccatggtgggtcctgaggctggtggtactaaggaagttcctattaaagaaatagttgaaatgaatgaaatagaagaaggtaaaaataaggaacaagcaataaacagttcagagaacataatggacatcaatgaggaaccaggaacaactgaaggtgaagaaatcactgagtcaagtagcactgaagaaatggaggtcagaagtgtggtggctgatactgaccaaaaggctttaggaagtgaagttcaggatgcttctaaagtcactactcagatagataaagagaaaaaagaaattccagtgtcaattaaaaaagagcctgaagttactgtagtttcacagcccactgaacctcagcctgttctaatacccagtattaatatcaactctgacagtggagaaaataaagaagaaataggttctttatcaaaaactgaaactattctgccaccagaatctgagaatccaaaggaaaatgataatgattcaggcactggttccactgctgatactagcagtattgacttgaatttatccatctctagctttctaagtaaaactaaagacagtggatcgatatctttacaagaaacaagaagacaaaagaaaacattgaagaaaacacgcaaatttattgttgatggtgtagaagtgagtgtaacaacatcaaagatagttacagatagtgattccaaaactgaagaattgcggtttcttagacgtcaggaacttcgggaattaagatttcttcagaaagaagagcaaagagcccaacaacagctcaatagcaaactacagcaacaacgagaacaaattttccggcgctttgagcaggaaatgatgagtaaaaagcgacaatatgaccaggaaattgagaatctagaaaaacagcagaaacagactatcgaacgcctggaacaagagcacacaaatcgcttgcgagatgaagccaaacgcatcaaaggagaacaagagaaagagttgtccaaatttcagaatatgctgaagaaccgaaagaaggaggttataaatgaagtggagaaagcacccaaagagctgagaaaagagctcatgaaacgcaggaaagaggagcttgcacaaagccagcatgctcaggaacaagagtttgttcagaaacaacagcaagaattagatggctctctgaaaaagatcatccagcagcagaaggcagagttagctaatattgagagagagtgcctgaataacaagcaacagctcatgagagctcgagaagctgcaatttgggagctcgaagaacgacacttacaagaaaaacaccagctgctcaaacagcagcttaaagatcagtatttcatgcaaagacatcagctacttaagcgccacgagaaggaaacagagcaaatgcagcgttacaatcaaagacttattgaggaattgaaaaacagacagactcaagaaagagcaagactgcccaagattcagcgcagtgaagccaagactcgaatggccatgtttaagaagagtttgagaattaactcaacagccacaccagatcaggaccgtgataaaattaaacagtttgctgcacaagaagaaaagaggcagaaaaatgagagaatggctcagcatcagaaacatgagaatcaaatgcgagatcttcagttgcagtgtgaagccaatgtccgcgaactgcatcagctgcagaatgaaaaatgccacttgttggttgagcatgagactcagaaactgaaggagttagatgaggaacatagccaagaattaaaggagtggagagagaaattgagacctaggaaaaagacactggaagaagagtttgccaggaaactacaggaacaggaagtattctttaaaatgactggggagtctgaatgccttaacccatcaacacagagccggatttccaaattttatcctattcccagcttgcattccaccggatcataacaaagggaagcattctgtgcgtgggtttggctctttcagtatgtcattctgttctcatcttctgccacagtctctcagatagctcatgaagacaatcacctgcctcaccttctaggtgttttccttttttgttttttttgttttgttttgtttttaagcaaagatgaagggaaaacgaactaagacagacgctaggccatgttggcaaagtagcatcttggtgactaaggtgactttgtatattcatcttaaaaattatgttctttagacactgctacctgaaaactgttggagaaataatgtttaaagttatttaagaaaaactgttacatcactaagtattaataaattcttcttacctgacgtaacttctcaatgcctaaattctgtagttgaagctctgctgcagagagttgggataattttcttttggtggatcagctctcataaaaaagctatgatttgctcaaatatgctgttgactcagtaaatgaatatatttttttctttaaataggaacaacctcttttaaaagagaaaaattatttcagtgatttgtcaaaacgaattacctcttttggcatgagctaataattgagggtgctaattttcttaagatagtgcctaaaacactaaatttcagtcaagtcgtaagtaggattttctttttgatcaacagggacaaaaacatctttagaattaaaaacatggttgttttggaatttttgcttctcttaccgtttgatagaaattttcatcctaaaatacatgtacaaagtttggaaagatgaaaaaaagaggtagcttttagattgcaaattggaaatgtaaaactcatgaaatttaagcaatataggtttagctatctgtgtttattttctaaaataatacctgagctggttaaatgatttctctccatcttagctaattctgtttaaaactctgtcagaggcctgcaggctgtgagttatatttataaatatatcttcagaaattaatcttaaaagaggcattagttcagaatacttttttaaaagtttaaattaaatatttaggcacgtcagaaattacttttccttattttgaaatgaggctacttatgtcttggttttattttgttccatgtttaaatcattcactttgatttgagtgggaaaagcctgaagcctttatcatgtggttgctggtgtgtgtaattattaatgaaatgttcactcctagtcccttatgaggcttagaatttcaaccacgtgtcaggtcagacagtattataaactgtactttgctgtctgagacagcacatttgtgaatgatgcttgctgcctgccattttcaacctattctctcttaagagtgctaggtaccaaattgtgaaagtttgttttcagttatattacttttgaggctggtgaaaaatttaaatgtaactttgtgggaacactgattcatatttagaaaatgtaaatgtctgtagcactttcttgcagttaatttgaaaactttggatgctgaaccttgtttgtcagtgatttagatgatttaaaaatgcatgtgtgatttgaattttataattgttttgacaagcataatttacttggacaacttcgtaggtagccttaacttctggccaagtttgttttttatataaatatatatacatatatacatattatgtatggttgtaaattcatacacttatcacatgaatgtgttactgtatacaaaactcttaatgctttattctcaaatgctgggttgaaaaatgttttgaaagccttttaaaatatatatctttataaagtaatattcaggatgatgataaaaattgtttatattgttatgataaaaatgacagtataatgttaaaaaaaaaaaaaaaaaaaaaaa

SEQ ID NO: 14588 - protein, 1235 aa, Homo sapiens; identical to SEQ ID NO: 12190
  ref <308>: DATABASE ACCESSION NUMBER: SWISS-Prot / AAG34908
  ref <309>: DATABASE ENTRY DATE: 2003-02-01

SEQ ID NO: 14589 - DNA, 277 bp, Rattus norvegicus
  misc_feature (1)..(277): n=a, c, g or t
  ref <308>: DATABASE ACCESSION NUMBER: EMBL / H31753
  ref <309>: DATABASE ENTRY DATE: 2000-03-04
aatatcgattcgtttaagtagtttattttctcaacgcagacatcaactttngaattgtccctttggcttaccctgggagttttacacattgtcttgtgcaaagtttctccaacagacttaagaaatgatttagtcgggattggggatttagctcagtggtagagcacttgtctagcaagcgcaaggcccngagttcggtccccagctccgggngggnaaaaaatgatttagtcgaatagctggactttaaggaatccngataagaggtgaacaacgg

SEQ ID NO: 14590 - DNA, 430 bp, Rattus norvegicus; identical to SEQ ID NO: 13510
  misc_feature (1)..(430): n=a, c, g or t
  ref <308>: DATABASE ACCESSION NUMBER: EMBL / H33448
  ref <309>: DATABASE ENTRY DATE: 2000-03-04

SEQ ID NO: 14591 - DNA, 468 bp, Rattus norvegicus
  misc_feature (1)..(468): n=a, c, g or t
  ref <308>: DATABASE ACCESSION NUMBER: EMBL / H33750
  ref <309>: DATABASE ENTRY DATE: 2000-03-04
actgtgaactctgacccactgttcagtcatttatttcgcatcttttagagtccccgcacaactccatatttnactccctaagggctaatccactccctggggaacaaacagaagacagccctccaccaggtctcagctgtggaccccttgcactgcaattccagtccaggaaggtgtggtactcagtctgatcaggctggcccaagctagcagctctatcattatcaggagttcttggattttngctctttcctggccctagaggccatgattctgaagaaaagtctaggagccagagttctgatgtagacagccatggttggcagaaagtcagtcaagagaacatcttttttcttcttcccccacagcatcaaaggatatcctgggggccacctccacagcggttccggccctggggcttgtngttcttgtctagggggctnccatatctgggggcccatcagcagt

SEQ ID NO: 14592 - protein, 344 aa, Rattus norvegicus
  ref <308>: DATABASE ACCESSION NUMBER: PIR / A42345
  ref <309>: DATABASE ENTRY DATE: 1999-09-29
MMLAARLSRPLSQLPGKALSVCDRENGTRHTLLFYPASFSPDTRRTYTSQADAASGKAVLVTGCDSGFGFSLAKHLHSKGFLVFAGCLLKEQGDAGVRELDSLKSDRLRTIQLNVCNSEEVEKAVETVRSGLKDPEKGMWGLVNNAGISTFGEVEFTSMETYKEVAEVNLWGTVRTTKSFLPLLRRAKGRVVNISSMLGRMANPARSPYCITKFGVEAFSDCLRYEMHPLGVKVSVVEPGNFIAATSLYSPERIQAIAKKMWDELPEVVRKDYGKKYFDEKIAKMETYCNSGSTDTSSVINAVTHALTAATPYTRYHPMDYYWWLRMQVMTHFPGAISDKIYIH

SEQ ID NO: 14593 - DNA, 1377 bp, Homo sapiens
  ref <308>: DATABASE ACCESSION NUMBER: EMBL / AF151851
  ref <309>: DATABASE ENTRY DATE: 2000-05-23
ccagagcgggaggatgaagttgattgactatggtctctccggctaccaggaagagtctgccgaagtgaaggccatggacttcatcacctccacagccatcctgcccctgctgttcggctgcctgggcgtcttcggcctcttccggctgctgcagtgggtgcgcgggaaggcctacctgcggaatgctgtggtggtgatcacaggcgccacctcagggctgggcaaagaatgtgcaaaagtcttctatgctgcgggtgctaaactggtgctctgtggccggaatggtggggccctagaagagctcatcagagaactcaccgcttctcatgccaccaaggtgcagacacacaagccttacttggtgaccttcgacctcacagactctggggccatagttgcagcagcagctgagatcctgcagtgctttggctatgtcgacatacttgtcaacaatgctgggatcagctaccgtggtaccatcatggacaccacagtggatgtggacaagagggtcatggagacaaactactttggcccagttgctctaacgaaagcactcctgccctccatgatcaagaggaggcaaggccacattgtcgccatcagcagcatccagggcaagatgagcattccttttcgatcagcatatgcagcctccaagcacgcaacccaggctttctttgactgtctgcgtgccgagatggaacagtatgaaattgaggtgaccgtcatcagccccggctacatccacaccaacctctctgtaaatgccatcaccgcggatggatctaggtatggagttatggacaccaccacagcccaggccgaagccctgtggaggtggcccaggatgttcttgctgctgtggggaagaagaagaaagatgtgatcctggctgacttactgccttccttggctgtttatcttcgaactctggctcctgggctcttcttcagcctcatggcctccagggccagaaaagagcggaaatccaagaactcctagtactctgaccagccagggccagggcagagaagcagcactcttaggcttgcttactctacaagggacagttgcatttgttgagactttaatggagatttgtctcacaagtgggaaagactgaagaaacacatctcgtgcagatctgctggcagaggacaatcaaaaacgacaacaagcttcttcccagggtgaggggaaacacttaaggaataaatatggagctggggtttaacactaaaaactagaaataaacatctcaaacagtaagagttgtagtcttccaggactagaaccttgtgtcctttgaattctcgccctgccagctcctagaaatagtttcaatcttggaatcagatgttatgtcacctgaaa

SEQ ID NO: 14594 - protein, 291 aa, Homo sapiens
  ref <308>: DATABASE ACCESSION NUMBER: SWISS-Prot / AAD34088
  ref <309>: DATABASE ENTRY DATE: 2003-02-01
MKLIDYGLSGYQEESAEVKAMDFITSTAILPLLFGCLGVFGLFRLLQWVRGKAYLRNAVVVITGATSGLGKECAKVFYAAGAKLVLCGRNGGALEELIRELTASHATKVQTHKPYLVTFDLTDSGAIVAAAAEILQCFGYVDILVNNAGISYRGTIMDTTVDVDKRVMETNYFGPVALTKALLPSMIKRRQGHIVAISSIQGKMSIPFRSAYAASKHATQAFFDCLRAEMEQYEIEVTVISPGYIHTNLSVNAITADGSRYGVMDTTTAQAEALWRWPRMFLLLWGRRRKM

SEQ ID NO: 14595 - DNA, 2190 bp, Rattus norvegicus; identical to SEQ ID NO: 7596
  ref <308>: DATABASE ACCESSION NUMBER: EMBL / S46785
  ref <309>: DATABASE ENTRY DATE: 2000-03-04

SEQ ID NO: 14596 - protein, 603 aa, Rattus norvegicus; identical to SEQ ID NO: 7597
  ref <308>: DATABASE ACCESSION NUMBER: SWISS-Prot / P35859
  ref <309>: DATABASE ENTRY DATE: 2001-10-16

SEQ ID NO: 14597 - DNA, 2125 bp, Homo sapiens; identical to SEQ ID NO: 7598
  ref <308>: DATABASE ACCESSION NUMBER: EMBL / M86826
  ref <309>: DATABASE ENTRY DATE: 2000-03-04

SEQ ID NO: 14598 - protein, 605 aa, Homo sapiens; identical to SEQ ID NO: 7599
  ref <308>: DATABASE ACCESSION NUMBER: SWISS-Prot / P35858
  ref <309>: DATABASE ENTRY DATE: 2002-06-15

SEQ ID NO: 14599 - DNA, 749 bp, Rattus norvegicus
  ref <308>: DATABASE ACCESSION NUMBER: EMBL / S58528
  ref <309>: DATABASE ENTRY DATE: 2000-03-04
aagctggaagtttctgtatatagtgatcaaaagaagatctatattggggatgacaaccctctgaccctgaccgtgaaggcgcagaatcaaggagaaggcgcctatgaagctgagctcatcgtttctatcccaccgcaggctgacttcatcggggttgtccggaacaacgaagccttagcaagactgtcctgtgcatttaagacagaaaaccaaacccggcaggtggtgtgtgaccttgggaacccgaagaaggctggaactcaactgcttgctggccttcgtttcagcgtgcaccagcaatcagagatggatacttctgtgaagtttgacttgaaaatccaaagctctaattcttttgacaatgtcagcccagtcgtgtcttacaaggtcgaccttgccgttttggctgcagttgagataagaggagtttcaagccctgatcacatctttcttccaattccaaactgggagcacaaggaaagccctgagaccgaagaagacgttgggcctgttgttcagcacatctatgagctgagaaacaatggtccaagttcattcagcaaggcaatcctgaacctccagtggccttacaaatacaacaacaatactttgctgtacattctccattacgacattgatggaccaatgaactgcacttcagatatggagatcaaccctttgagaattaagatgcctgaaaagaatgacacgggagctgagcaaggaggaaggaatcatctcatcaccaa

SEQ ID NO: 14600 - protein, 248 aa, Rattus norvegicus
  ref <308>: DATABASE ACCESSION NUMBER: SWISS-Prot / AAB26277
  ref <309>: DATABASE ENTRY DATE: 2002-06-01
KLEVSVYSDQKKIYIGDDNPLTLTVKAQNQGEGAYEAELIVSIPPQADFIGVVRNNEALARLSCAFKTENQTRQVVCDLGNPKKAGTQLLAGLRFSVHQQSEMDTSVKFDLKIQSSNSFDNVSPVVSYKVDLAVLAAVEIRGVSSPDHIFLPIPNWEHKESPETEEDVGPVVQHIYELRNNGPSSFSKAILNLQWPYKYNNNTLLYILHYDIDGPMNCTSDMEINPLRIKMPEKNDTGAEQGGRNHLI

SEQ ID NO: 14601 - DNA, 5717 bp, Homo sapiens
  ref <308>: DATABASE ACCESSION NUMBER: Refseq / NM_002210
  ref <309>: DATABASE ENTRY DATE: 2002-11-05
ggctaccgctcccggcttggcgtcccgcgcgcacttcggcgatggcttttccgccgcggcgacggctgcgcctcggtccccgcggcctcccgcttcttctctcgggactcctgctacctctgtgccgcgccttcaacctagacgtggacagtcctgccgagtactctggccccgagggaagttacttcggcttcgccgtggatttcttcgtgcccagcgcgtcttcccggatgtttcttctcgtgggagctcccaaagcaaacaccacccagcctgggattgtggaaggagggcaggtcctcaaatgtgactggtcttctacccgccggtgccagccaattgaatttgatgcaacaggcaatagagattatgccaaggatgatccattggaatttaagtcccatcagtggtttggagcatctgtgaggtcgaaacaggataaaattttggcctgtgccccattgtaccattggagaactgagatgaaacaggagcgagagcctgttggaacatgctttcttcaagatggaacaaagactgttgagtatgctccatgtagatcacaagatattgatgctgatggacagggattttgtcaaggaggattcagcattgattttactaaagctgacagagtacttcttggtggtcctggtagcttttattggcaaggtcagcttatttcggatcaagtggcagaaatcgtatctaaatacgaccccaatgtttacagcatcaagtataataaccaattagcaactcggactgcacaagctatttttgatgacagctatttgggttattctgtggctgtcggagatttcaatggtgatggcatagatgactttgtttcaggagttccaagagcagcaaggactttgggaatggtttatatttatgatgggaagaacatgtcctccttatacaattttactggcgagcagatggctgcatatttcggattttctgtagctgccactgacattaatggagatgattatgcagatgtgtttattggagcacctctcttcatggatcgtggctctgatggcaaactccaagaggtggggcaggtctcagtgtctctacagagagcttcaggagacttccagacgacaaagctgaatggatttgaggtctttgcacggtttggcagtgccatagctcctttgggagatctggaccaggatggtttcaatgatattgcaattgctgctccatatgggggtgaagataaaaaaggaattgtttatatcttcaatggaagatcaacaggcttgaacgcagtcccatctcaaatccttgaagggcagtgggctgctcgaagcatgccaccaagctttggctattcaatgaaaggagccacagatatagacaaaaatggatatccagacttaattgtaggagcttttggtgtagatcgagctatcttatacagggccagaccagttatcactgtaaatgctggtcttgaagtgtaccctagcattttaaatcaagacaataaaacctgctcactgcctggaacagctctcaaagtttcctgttttaatgttaggttctgcttaaaggcagatggcaaaggagtacttcccaggaaacttaatttccaggtggaacttcttttggataaactcaagcaaaagggagcaattcgacgagcactgtttctctacagcaggtccccaagtcactccaagaacatgactatttcaagggggggactgatgcagtgtgaggaattgatagcgtatctgcgggatgaatctgaatttagagacaaactcactccaattactatttttatggaatatcggttggattatagaacagctgctgatacaacaggcttgcaacccattcttaaccagttcacgcctgctaacattagtcgacaggctcacattctacttgactgtggtgaagacaatgtctgtaaacccaagctggaagtttctgtagatagtgatcaaaagaagatctatattggggatgacaaccctctgacattgattgttaaggctcagaatcaaggagaaggtgcctacgaagctgagctcatcgtttccattccactgcaggctgatttcatcggggttgtccgaaacaatgaagccttagcaagactttcctgtgcatttaagacagaaaaccaaactcgccaggtggtatgtgaccttggaaacccaatgaaggctggaactcaactcttagctggtcttcgtttcagtgtgcaccagcagtcagagatggatacttctgtgaaatttgacttacaaatccaaagctcaaatctatttgacaaagtaagcccagttgtatctcacaaagttgatcttgctgttttagctgcagttgagataagaggagtctcgagtcctgatcatatctttcttccgattccaaactgggagcacaaggagaaccctgagactgaagaagatgttgggccagttgttcagcacatctatgagctgagaaacaatggtccaagttcattcagcaaggcaatgctccatcttcagtggccttacaaatataataataacactctgttgtatatccttcattatgatattgatggaccaatgaactgcacttcagatatggagatcaaccctttgagaattaagatctcatctttgcaaacaactgaaaagaatgacacggttgccgggcaaggtgagcgggaccatctcatcactaagcgggatcttgccctcagtgaaggagatattcacactttgggttgtggagttgctcagtgcttgaagattgtctgccaagttgggagattagacagaggaaagagtgcaatcttgtacgtaaagtcattactgtggactgagacttttatgaataaagaaaatcagaatcattcctattctctgaagtcgtctgcttcatttaatgtcatagagtttccttataagaatcttccaattgaggatatcaccaactccacattggttaccactaatgtcacctggggcattcagccagcgcccatgcctgtgcctgtgtgggtgatcattttagcagttctagcaggattgttgctactggctgttttggtatttgtaatgtacaggatgggcttttttaaacgggtccggccacctcaagaagaacaagaaagggagcagcttcaacctcatgaaaatggtgaaggaaactcagaaacttaactgcagtttttaagttatgctacatcttgacccactagaattagcaactttattatagatttaaactttcttcatgaggagtaaaaatccaaggctttactgctgatagtgctaattggcattaaccacaaaatgagaattatatttgtcaaccttctccttataaataagttcagacatacatttaataacatagggtgacttgtgtttttaggtatttaaataataaaatttcaagggatagtttttattcaatgtatataagacaggtagtgcctgatttactactttatataaaatagtacctccttcagttactgtttctgatttaatgtacggaactttatttgttgttgttgttgttgttgttgttgttgttttaaagcagtccaaatttggaccttagcaatcatgtcttttgtataggtacttaatgttaatacatattacactacagtttacttttcagaatactaaagactttataactgcatgaacttggatttttttaatcactcatatggtagaattttataaacacatacatgataccatccaaattcttgcttttaataacaaaggtacaatattttgttttagtatgaaaatctggtagatcctattacacttctgtttatattaaatccacaatattttattacatttttaacttgtataaattttaggtcaaatccttcaagccaacctatactaaaaattagttccataatcacaaatggctcttttgtgtaattgtttaatttcacctgaatatcataatgcttaaagccatatggagttggaaattatttccaaagcatatttattccattgttttagtctggctatttacagtataaaaaaagcattttattaaaatactgtgtagttctttgagatagttgcttatgcatatagtaagtattacattcttagagtagagcagagtttttagttagtattaatttattttcctccattcatgtacttttccttatatttccaaaactgttactgagaatgggtcaagatcagtgagaaatctttacagttgacaggaacctggaccccttaccccaactttatgagtaatgcttggaataaaaaactcttaaggcaactcactgatttacttctagcaatagcatgatgttacaggaatattacctctgtttaagcaaggtaatgtgtaaaatcagtctcggctgtcagaataacttctaaaaggtatttttataagcagttcaagttactgaaaaccttttaaacctttctgaagttcgttagtataaattacttttctaggattattaataaaagccacataggtggcaagttgtagttttatatggctctgtagagtggtgaaccttctagaggaatatatgatttattcacagttcctcaaggcctggggatgatgatcagttatacctatttttgtgcaattacatcatgttgtacattagaaatggagagtttaatagctctttaactgctgtcctcattaggtaatgataaatatttcccttaaataattgactattttgctgtgttttaaaaatgattgaaatttatcttgccatatctcataatttcatgcacaagttgactgagctaatcttgagaatatattcgtaaaataggagcacatttagttgaggtatacaaggtaggactctagacaaaaccttctattttagctttagtgaatttcaaaagtaatgggtcttggagtatagatttttattagtagcttgaaagagcttaatcatatgcagtaagtatttttattaccaataaatttaaaattttttaagaaaaatatttttatcctagggccaagtgttgcctgccaccaatcagtaagttagtctataacaaattttaccctaacagttttaccacctagcaacagtcatttctgaaaatatgttggatagaaagtcactctttggcaaaagtgttagaatttgcttttgtgccatctattccttttatggcatctatcttgaaagtaatcttgtattggagattgaaagatgctgtaatttagaaattaacatgatatcttaaattacctttatgaaatatagttttgtataatagcatagattttccttcaaaaaatgaacatttatatatctacaaaaatatggagaagagcaatttgaaagcctactttctgaagaaaatggtgggatttttttttatcatgattaaatatcaaaaaattgccctatgaaaactttaaatctctaaaacatttgaaatactaccatatttgtgatttattgagaataaaaatccattttgaaatgtaaaatttttatgatctgattcagttttaagaaaacatgaatgaactagaagatattaaaaacatttgacattggtaagaaatattgatactgatattgatttttatataggtatttatttcagaattgatattttgagaaaaatacatgtgagtcattttttctgtttctcttttctcttaacgattatcactgtaattctgaatct

SEQ ID NO: 14602 - protein, 1048 aa, Homo sapiens
  ref <308>: DATABASE ACCESSION NUMBER: Refseq / NP_002201
  ref <309>: DATABASE ENTRY DATE: 2002-11-05
MAFPPRRRLRLGPRGLPLLLSGLLLPLCRAFNLDVDSPAEYSGPEGSYFGFAVDFFVPSASSRMFLLVGAPKANTTQPGIVEGGQVLKCDWSSTRRCQPIEFDATGNRDYAKDDPLEFKSHQWFGASVRSKQDKILACAPLYHWRTEMKQEREPVGTCFLQDGTKTVEYAPCRSQDIDADGQGFCQGGFSIDFTKADRVLLGGPGSFYWQGQLISDQVAEIVSKYDPNVYSIKYNNQLATRTAQAIFDDSYLGYSVAVGDFNGDGIDDFVSGVPRAARTLGMVYIYDGKNMSSLYNFTGEQMAAYFGFSVAATDINGDDYADVFIGAPLFMDRGSDGKLQEVGQVSVSLQRASGDFQTTKLNGFEVFARFGSAIAPLGDLDQDGFNDIAIAAPYGGEDKKGIVYIFNGRSTGLNAVPSQILEGQWAARSMPPSFGYSMKGATDIDKNGYPDLIVGAFGVDRAILYRARPVITVNAGLEVYPSILNQDNKTCSLPGTALKVSCFNVRFCLKADGKGVLPRKLNFQVELLLDKLKQKGAIRRALFLYSRSPSHSKNMTISRGGLMQCEELIAYLRDESEFRDKLTPITIFMEYRLDYRTAADTTGLQPILNQFTPANISRQAHILLDCGEDNVCKPKLEVSVDSDQKKIYIGDDNPLTLIVKAQNQGEGAYEAELIVSIPLQADFIGVVRNNEALARLSCAFKTENQTRQVVCDLGNPMKAGTQLLAGLRFSVHQQSEMDTSVKFDLQIQSSNLFDKVSPVVSHKVDLAVLAAVEIRGVSSPDHIFLPIPNWEHKENPETEEDVGPVVQHIYELRNNGPSSFSKAMLHLQWPYKYNNNTLLYILHYDIDGPMNCTSDMEINPLRIKISSLQTTEKNDTVAGQGERDHLITKRDLALSEGDIHTLGCGVAQCLKIVCQVGRLDRGKSAILYVKSLLWTETFMNKENQNHSYSLKSSASFNVIEFPYKNLPIEDITNSTLVTTNVTWGIQPAPMPVPVWVIILAVLAGLLLLAVLVFVMYRMGFFKRVRPPQEEQEREQLQPHENGEGNSET

SEQ ID NO: 14603 - DNA, 1030 bp, Rattus norvegicus; identical to SEQ ID NO: 13548
  ref <308>: DATABASE ACCESSION NUMBER: EMBL / S65091
  ref <309>: DATABASE ENTRY DATE: 2000-06-14

SEQ ID NO: 14604 - DNA, 1000 bp, Rattus norvegicus
  ref <308>: DATABASE ACCESSION NUMBER: EMBL / S76489
  ref <309>: DATABASE ENTRY DATE: 2000-03-04
caggagcatctggacagtacaccacttgtgatggagacttctatgcctgaatactatgacgtttttggtgatttccatggatttttaatggataaacggttcaccaaatattgggaagacgttgaaacattcttggcaaggccagatgaccttctcattgttacttatcctaaatctggcagcacatggattagtgaaattgtggatatgatctataaagaaggtgatgtggaaaaatgcaaggaggatgcactttttaacagaatacctgacctggagtgcagaaatgaagatctaataaacggaataaaacaactaaaagaaaaggaatcgcctagaatagtgaaaactcacctgccagctaagctccttccagcatcattttgggaaaagaattgcaagataatctatctttgccgaaatgccaaagatgtcgtcgtttcttattactactttttcctgatcatgaaaagttatcaaaatcctaaatctttttctgaatttgtggagaaatttatggaagggcaagttccgtatggttcctggtatgatcatgtaaaatcttggtgggagaagagtaagaattcacgtgttttgtttatgttctatgaggacatgaaagaggatatccgaagagaagttgtgaagctgatagagttcctggagagagacccatcagcagagctagtagacagaatcattcaacatacatcattccaggagatgaagaacaatccatgcatcaattattcaatgctgccagagaccatgatagatctaaaagtatcgcctttcatgagaaagggaattgtaggagactggaagaaccacttccctgaagccctgagggagagatttgaggagcactaccagcagcaaatgaaggactgccctgtgaaatttagagcagagccctgagacaattccttgtgtctgaaattggagtagtctccaatttatccttcagtttttcttgttttgaattcagtagaagtagaag

SEQ ID NO: 14605 - protein, 295 aa, Rattus norvegicus
  ref <308>: DATABASE ACCESSION NUMBER: SWISS-Prot / P52844
  ref <309>: DATABASE ENTRY DATE: 2002-06-15
METSMPEYYEVFGDFHGFLMDKRFTKYWEDIETFLARPDDLLIVTYPKSGSTWISEIVDMIYKEGDVEKCKEDALFNRIPDLECRNEDLINGIKQLKEKESPRIVKTHLPAKLLPASFWEKNCKIIYLCRNAKDVVVSYYYFFLIMKSYPNPKSFSEFVEKFMEGQVPYGSWYDHVKSWWEKSKNSRVLFMFYEDMKEDIRREVVKLIEFLERDPSAELVDRIIQHTSFQEMKNNPCTNYSMLPETMIDLKVSPFMRKGIVGDWRNHFPEALRERFEEHYQRHMKDCPVKFRAEL

SEQ ID NO: 14606 - DNA, 1046 bp, Homo sapiens
  ref <308>: DATABASE ACCESSION NUMBER: EMBL / U08098
  ref <309>: DATABASE ENTRY DATE: 2000-03-04
agaagtggttctcatctttttttgcagcttaagatctgccttggtatttgaagagatataaactagatcaatttctttcacaggatcaactaaacagtgtaccacaatgaattctgaacttgactattatgaaaagtttgaagaagtccatgggattctaatgtataaagattttgtcaaatattgggataatgtggaagcgttccaggcaagaccagatgatcttgtcattgccacctaccctaaatctggtacaacctgggttagtgaaattgtgtatatgatctataaagagggtgatgtggaaaagtgcaaagaagatgtaatttttaatcgaatacctttcctggaatgcagaaaagaaaacctcatgaatggagtaaaacaattagatgagatgaattctcctagaattgtgaagactcatttgccacctgaacttcttcctgcctcattttgggaaaaggattgtaagataatctatctttgccggaatgcaaaggatgtggctgtttccttttattatttctttctaatggtggctggtcatccaaatcctggatcctttccagagtttgtggagaaattcatgcaaggacaggttccttatggttcctggtataaacatgtaaaatcttggtgggaaaagggaaagagtccacgtgtactatttcttttctacgaagacctgaaagaggatatcagaaaagaggtgataaaattgatacatttcctggaaaggaagccatcagaggagcttgtggacaggattatacatcatacttcgttccaagagatgaagaacaatccatccacaaattacacaacactgccagacgaaattatgaaccagaaattgtcgcccttcatgagaaagggaattacaggagactggaaaaatcactttacagtagccctgaatgaaaaatttgataaacattatgagcagcaaatgaaggaatctacactgaagtttcgaactgagatctaagaaggtctttctttacttaacatatctgatattaaagatttcttttcattattca

SEQ ID NO: 14607 - protein, 294 aa, Homo sapiens
  ref <308>: DATABASE ACCESSION NUMBER: SWISS-Prot / P49888
  ref <309>: DATABASE ENTRY DATE: 2002-06-15
MNSELDYYEKFEEVHGILMYKDFVKYWDNVEAFQARPDDLVIATYPKSGTTWVSEIVYMIYKEGDVEKCKEDVIFNRIPFLECRKENLMNGVKQLDEMNSPRIVKTHLPPELLPASFWEKDCKIIYLCRNAKDVAVSFYYFFLMVAGHPNPGSFPEFVEKFMQGQVPYGSWYKHVKSWWEKGKSPRVLFLFYEDLKEDIRKEVIKLIHFLERKPSEELVDRIIHHTSFQEMKNNPSTNYTTLPDEIMNQKLSPFMRKGITGDWKNHFTVALNEKFDKHYEQQMKESTLKFRTEI

SEQ ID NO: 14608 - DNA, 3315 bp, Rattus norvegicus
  ref <308>: DATABASE ACCESSION NUMBER: EMBL / S78744
  ref <309>: DATABASE ENTRY DATE: 2000-03-04
gagcagagttgggagagcagagcccaggctcgcagctcctctccgccaagctcaggcaccgtcctccccgcgccatcacagacccccggccgcccgctcagcaatgagggtcctgagcgtgcgctttcgggtgctactggcctgcctcgccctggtgctcccaaactcagagacaaacttcttgtcaaaagaacgagcttcacaagtcctggtgaggaagcgccgtgcaaataccttgctcgaagaaactaaaaagggcaaccttgaaagagagtgcattgaagaactctgcaataaggaggaagccagggaggtctttgaaaataatcccgaaacggattatttttatccaaaatatttaggttgtctgggcgcattccgagttggcgcattcagtgctgcgaggcagtcagctaatgcttaccctgacctcaggagctgtgtcaatgccatcccagaccaatgtgaccctatgccatgcaatgaagatgggtatctgagctgcaaagacggccaaggtgcttttacttgcatctgtaaaccaggctggcaaggagacaagtgtcagtttgatataaatgaatgcaaagatccctcaaatatcaatgggggctgtagccagacttgtgacaatactcctggaagttaccactgctcctgtaaaattggctttgctatgctcacaaataagaaagactgcaaagatgtggatgagtgctctctaaagccaagtgtctgtggcacagctgtgtgcaagaacattccaggagacttcgaatgtgaatgtcccaatggctacagatatgatccctcatcaaaatcttgtaaagatgtcgatgaatgctctgaaaacacctgtgcccaactgtgtgtcaattaccccggaggctactcttgttactgtgatgggaagaaaggattcaaacttgcccaagatcagaggagttgtgagggtattccagtgtgcctttccttggaccttgacaaaaattatgaattattatatttggcggaacagttcgcaggagttgtcttatatctgaaatttcgattgccagatatcaccaggttttcagctgaatttgattttcggacatatgattcagagggcatcatactgtatgcagaatctctcgatcactcaaattggctcctgattgcacttcgtgaagggaagattgaagttcagtttaagaatgagttttcaacccaaatcacaactggaggcaatgttattaacaatggtatatggaatatggtgtctgtggaagaattagacgacagtgttagcattaaaatagctaaggaggccgtgatgaatattaataaacttgggagtctttttaaacctaccgatggatttctggacaccaaaatatactttgcaggattacctcggaaggtggaaagtgcactcattaagccgattaatcctcgtctggatggatgtatacgaggctggaacttgatgaaacaaggagctttgggtgcaaaggaaatagttgaaggaaaacaaaataaacattgcttcctcactgtggagaagggctcctactaccctggttcaggaattgctcagttcagcatagactacaataatgtaactaatgcagagggttggcaaataaatgtgaccttgaatattcgcccgtccactggcactggagtcatgcttgctttagtttctggggacacagtgccctttgccttgtccttggtggattctggctctggaacttctcaggacattctggtatttgttgaaaattcagtagcagctcacttagaagccataactctgtgctcggaacagccatcccagctgaaatgtaacattaacagaaatggactggaactgtggaccccagttagaaaagacgtcatttactctaaagatctccaaaggcaactcgccatcttggacaaaacaatgaaaggaaccgtggccacttacctgggtggcgttccagatatttccttcagtgccacaccagtgaatgctttttacagcggctgcatggaagtgaacatcaacggggtacagttggatctggatgaagccatttccaaacataatgacattagagctcactcctgtccgtcagtgaggaaaatccagaagaacttctaaagtctgtttcctgggcttctaatctctcttttcatattgtaattatgctcttgttcatgtttccatcaccaaatggcagggtgacatgtgttatatgcaggtttaaatatgatgtggtactttggtccttcagatttttgttatataagtcgtatttttgaaaagtcttgtactcactgctgtctagaaattaaataacaaaacacatccggaattctaaatcagggtactcagtgacctgctaaagatctttaatggtagagagggacttcactggcgatgactgtcaactatgtgagcccgggaccccgaggaggtctctcggacatgcccggacaaaacccactgcggttggagtctcctgacagaacttcgaccttctggagaagtcctcaatatttgtacagtcagtgttgtcgacacaagaacgtagccgacaggcagaagaggagtcggtatccctgtggaaggggacagtcgacgtcctttcgtaacacagtgaacaccgtacggttgtccggcgtcaccccaaacctataataaaactgatctgtgcgatgaagtgtagagactcaaaacaaaccggtagataacctcccctattggcaatctttttcgagtgagattaggaatttactccactcacacggaacgtacactgtagtggacagaaatttatcctggagtgatacatcgtaaccgaccggacgtcaagtggtatatgcggtccaaccggaacttgagggtcgtctggggacgcagacagaggactcacaactctactgggtagacgtgggagtgtgggtcggaactggtagtggaaattgccaaaatacttatggtttataacgatgaaagaaagtgtacgattcaggtcttagtctggcgcaacaaccacaataacaaggaacaaacaaactcgttcataatttgagtcctgcggtggacacgatccacagtctttgtacctagaactgaagtaccattctcacaacctccgcgtctcatcgtcactgcgtcaaacaaaacgttggagcgtttgggtccgcagtatctctgtcactaactcgtgtctcttgacaaaaaggctgagtctgagtcgggggtgggagggaaaaagtaaccgactcgcgagaactcgtggtggacccaaaaaagaaagggaggcgataatgtaagtggag

SEQ ID NO: 14609 - protein, 675 aa, Rattus norvegicus
  ref <308>: DATABASE ACCESSION NUMBER: SWISS-Prot / AAC60704
  ref <309>: DATABASE ENTRY DATE: 2002-06-15
MRVLSVRFRVLLACLALVLPNSETNFLSKERASQVLVRKRRANTLLEETKKGNLERECIEELCNKEEAREVFENNPETDYFYPKYLGCLGAFRVGAFSAARQSANAYPDLRSCVNAIPDQCDPMPCNEDGYLSCKDGQGAFTCICKPGWQGDKCQFDINECKDPSNINGGCSQTCDNTPGSYHCSCKIGFAMLTNKKDCKDVDECSLKPSVCGTAVCKNIPGDFECECPNGYRYDPSSKSCKDVDECSENTCAQLCVNYPGGYSCYCDGKKGFKLAQDQRSCEGIPVCLSLDLDKNYELLYLAEQFAGVVLYLKFRLPDITRFSAEFDFRTYDSEGIILYAESLDHSNWLLIALREGKIEVQFKNEFSTQITTGGNVINNGIWNMVSVEELDDSVSIKIAKEAVMNINKLGSLFKPTDGFLDTKIYFAGLPRKVESALIKPINPRLDGCIRGWNLMKQGALGAKEIVEGKQNKHCFLTVEKGSYYPGSGIAQFSIDYNNVTNAEGWQINVTLNIRPSTGTGVMLALVSGDTVPFALSLVDSGSGTSQDILVFVENSVAAHLEAITLCSEQPSQLKCNINRNGLELWTPVRKDVIYSKDLQRQLAILDKTMKGTVATYLGGVPDISFSATPVNAFYSGCMEVNINGVQLDLDEAISKHNDIRAHSCPSVRKIQKNF

SEQ ID NO: 14610 - DNA, 3294 bp, Homo sapiens
  ref <308>: DATABASE ACCESSION NUMBER: EMBL / Y00692
  ref <309>: DATABASE ENTRY DATE: 1992-10-21
ctggcgccgccgcgcagcacggctcagaccgaggcgcacaggctcgcagctccgcggcgcctagcgctccggtccccgccgcgacgcgccaccgtccctgccggcgcctccgcgcgcttcgaaatgagggtcctgggtgggcgctgcggggcgttgctggcgtgtctcctcctagtgcttcccgtctcagaggcaaactttttgtcaaagcaacaggcttcacaagtcctggttaggaagcgtcgtgcaaattctttacttgaagaaaccaaacagggtaatcttgaaagagaatgcatcgaagaactgtgcaataaagaagaagccagggaggtctttgaaaatgacccggaaacggattatttttatccaaaatacttagtttgtcttcgctcttttcaaactgggttattcactgctgcacgtcagtcaactaatgcttatcctgacctaagaagctgtgtcaatgccattccagaccagtgtagtcctctgccatgcaatgaagatggatatatgagctgcaaagatggaaaagcttcttttacttgcacttgtaaaccaggttggcaaggagaaaagtgtgaatttgacataaatgaatgcaaagatccctcaaatataaatggaggttgcagtcaaatttgtgataatacacctggaagttaccactgttcctgtaaaaatggttttgttatgctttcaaataagaaagattgtaaagatgtggatgaatgctctttgaagccaagcatttgtggcacagctgtgtgcaagaacatcccaggagattttgaatgtgaatgccccgaaggctacagatataatctcaaatcaaagtcttgtgaagatatagatgaatgctctgagaacatgtgtgctcagctttgtgtcaattaccctggaggttacacttgctattgtgatgggaagaaaggattcaaacttgcccaagatcagaagagttgtgaggttgtttcagtgtgccttcccttgaaccttgacacaaagtatgaattactttacttggcggagcagtttgcaggggttgttttatatttaaaatttcgtttgccagaaatcagcagattttcagcagaatttgatttccggacatatgattcagaaggcgtgatactgtacgcagaatctatcgatcactcagcgtggctcctgattgcacttcgtggtggaaagattgaagttcagcttaagaatgaacatacatccaaaatcacaactggaggtgatgttattaataatggtctatggaatatggtgtctgtggaagaattagaacatagtattagcattaaaatagctaaagaagctgtgatggatataaataaacctggacccctttttaagccggaaaatggattgctggaaaccaaagtatactttgcaggattccctcggaaagtggaaagtgaactcattaaaccgattaaccctcgtctagatggatgtatacgaagctggaatttgatgaagcaaggagcttctggaataaaggaaattattcaagaaaaacaaaataagcattgcctggttactgtggagaagggctcctactatcctggttctggaattgctcaatttcacatagattataataatgtatccagtgctgagggttggcatgtaaatgtgaccttgaatattcgtccatccacgggcactggtgttatgcttgccttggtttctggtaacaacacagtgccctttgctgtgtccttggtggactccacctctgaaaaatcacaggatattctgttatctgttgaaaatactgtaatatatcggatacaggccctaagtctatgttccgatcaacaatctcatctggaatttagagtcaacagaaacaatctggagttgtcgacaccacttaaaatagaaaccatctcccatgaagaccttcaaagacaacttgccgtcttggacaaagcaatgaaagcaaaagtggccacatacctgggtggccttccagatgttccattcagtgccacaccagtgaatgccttttataatggctgcatggaagtgaatattaatggtgtacagttggatctggatgaagccatttctaaacataatgatattagagctcactcatgtccatcagtttggaaaaagacaaagaattcttaaggcatcttttctctgcttataataccttttccttgtgtgtaattatacttatgtttcaataacagctgaagggttttatttacaatgtgcagtctttgattattttgtggtcctttcctgggatttttaaaaggtcctttgtcaaggaaaaaaattctgttgtgatataaatcacagtaaagaaattcttacttctcttgctatctaagaatagtgaaaaataacaattttaaatttgaatttttttcctacaaatgacagtttcaatttttgtttgtaaaactaaatttttaattttatcatcatgaactagtgtctaaatacctatgtttttttcagaaagcaaggaagtaaactcaaacaaaagtgcgtgtaattaaatactattaatcataggcagatactattttgtttatgtttttgtttttttcctgatgaaggcagaagagatggtggtctattaaatatgaattgaatggagggtcctaatgccttatttcaaaacaattcctcagggggaccagctttggcttcatctttctcttgtgtggcttcacatttaaaccagtatctttattgaattagaaaacaagtgggacatattttcctgagagcagcacaggaatcttcttcttggcagctgcagtctgtcaggatgagatatcagattaggttggataggtggggaaatctgaagtgggtacattttttaaattttgctgtgtgggtcacacaaggtctacattacaaaagacagaattcagggatggaaaggagaatgaacaaatgtgggagttcatagttttccttgaatccaacttttaattaccagagtaagttgccaaaatgtgattgttgaagtacaaaaggaactatgaaaaccagaacaaattttaacaaaaggacaaccacagagggatatagtgaatatcgtatcattgtaatcaaagaagtaaggaggtaagattgccacgtgcctgctggtactgtgatgcatttcaagtggcagttttatcacgtttgaatctaccattcatagccagatgtgtatcagatgtttcactgacagtttttaacaataaattcttttcactgtattttatatcacttataataaatcggtgtataatctaaaaaaaa

SEQ ID NO: 14611 - protein, 650 aa, Homo sapiens
  ref <308>: DATABASE ACCESSION NUMBER: SWISS-Prot / AAA60181
  ref <309>: DATABASE ENTRY DATE: 2003-02-01
LSKQQASQVLVRKRRANSLLEETKQGNLERECIEELCNKEEAREVFENDPETDYFYPKYLVCLRSFQTGLFTAARQSTNAYPDLRSCVNAIPDQCSPLPCNEDGYMSCKDGKASFTCTCKPGWQGEKCEFDINECKDPSNINGGCSQICDNTPGSYHCSCKNGFVMLSNKKDCKDVDECSLKPSICGTAVCKNILGDFECECPEGYRYNLKSKSCEDIDECSENMCAQLCVNYPGGHTCYCDGKKGFKLAQDQKSCEVVSVCLPLNLDTKYELLYLAEQFAGVVLYLKFRLPEISRFSAEFDFRTYDSEGVILYAESIYHSAWLLIALRGGKIEVQLKNEHTSKITTGGDVINNGLWNMVSVEELEHSISIKIAKEAVMDINKPGPLFKPENGLLETKVYFAGFPRKVESELIKPINPRLDGCIRSWNLMKQGASGIKEIIQEKQNKHCLVTVEKGSYYPGSGIAQFHIDYNNVSSAEGWHVNVTLNIRPSTGTGVMLALVSGNNTVPFAVSLVDSTSEKSQDILLSVENTVIYRIQALSLCSDQQSHLEFRVNRNNLELSTPLKIETISHEDLQRQLAVLDKAMKAKVATYLGGLPDVPFSATPVNAFYNGCMEVNINGVQLDLDEAISKHNDIRAHSCPSVWKKTKNS

SEQ ID NO: 14612 - DNA, 458 bp, Rattus norvegicus; identical to SEQ ID NO: 13588
  ref <308>: DATABASE ACCESSION NUMBER: EMBL / S79676
  ref <309>: DATABASE ENTRY DATE: 2000-03-04

SEQ ID NO: 14613 - protein, 402 aa, Rattus norvegicus; identical to SEQ ID NO: 13589
  ref <308>: DATABASE ACCESSION NUMBER: SWISS-Prot / AAB35431
  ref <309>: DATABASE ENTRY DATE: 2002-06-15

SEQ ID NO: 14614 - DNA, 620 bp, Rattus norvegicus
  ref <308>: DATABASE ACCESSION NUMBER: EMBL / S79711
  ref <309>: DATABASE ENTRY DATE: 2000-07-30
gccggctactaaggaactctcgacacttctactggagaagcaaagaaactaacatggagcaggggaaaggtttggctggcctcttcctggtgatctctcttcttcaaggcaccatggcccagcaaaaagaagaaaagcatttggtaaaagtggatgacagccaaggagatggctctgtacttctgacttgtgacttcaatgagaagactatcacatggcttaaagatgggcacagaataagtcctccaaatgcaactaaaagcacgtggaatctgggcaacggtgccaaagaccctcgaggcatgtatcagtgccgaggagcaaagaagaagtcgcagctcctgcaagtgtactacagactgtgtgagaactgcattgagctaaatatgggcactgtgtccggctttatcttcgctgaaatcatcagcattttcttccttgctgttggtgtatacttcattgctggacaggatggagttcgccagtcaagagcttcagacaagcagactctgttgcaaaatgaacaggtctaccagcccctcaaggaccgggaatatgaacagtacagccgtctccaaggaaaccaagtgagaaagaagtgaactcagcaggaattcgag

SEQ ID NO: 14615 - protein, 182 aa, Rattus norvegicus
  ref <308>: DATABASE ACCESSION NUMBER: SWISS-Prot / AAB21286
  ref <309>: DATABASE ENTRY DATE: 2002-06-15
MEQGKGLAGLFLVISLLQGTMAQQKEEKHLVKVDDSQGDGSVLLTCDFNEKTITWLKDGHRISPPNATKSTWNLGNGAKDPRGMYQCRGAKKKSQLLQVYYRLCENCIELNMGTVSGFIFAEIISIFFLAVGVYFIAGQDGVRQSRASDKQTLLQNEQVYQPLKDREYEQYSRLQGNQVRKK

SEQ ID NO: 14616 - DNA, 822 bp, Homo sapiens
  ref <308>: DATABASE ACCESSION NUMBER: Refseq / NM_000073
  ref <309>: DATABASE ENTRY DATE: 2002-11-05
gggctgctccacgcttttgccggagacagagactgacatggaacaggggaagggcctggctgtcctcatcctggctatcattcttcttcaaggtactttggcccagtcaatcaaaggaaaccacttggttaaggtgtatgactatcaagaagatggttcggtacttctgacttgtgatgcagaagccaaaaatatcacatggtttaaagatgggaagatgatcggcttcctaactgaagataaaaaaaaatggaatctgggaagtaatgccaaggaccctcgagggatgtatcagtgtaaaggatcacagaacaagtcaaaaccactccaagtgtattacagaatgtgtcagaactgcattgaactaaatgcagccaccatatctggctttctctttgctgaaatcgtcagcattttcgtccttgctgttggggtctacttcattgctggacaggatggagttcgccagtcgagagcttcagacaagcagactctgttgcccaatgaccagctctaccagcccctcaaggatcgagaagatgaccagtacagccaccttcaaggaaaccagttgaggaggaattgaactcaggactcagagtagtccaggtgttctcctcctattcagttcccagaatcaaagcaatgcattttggaaagctcctagcagagagactttcagccctaaatctagactcaaggttcccagagatgacaaatggagaagaaaggccatcagagcaaatttgggggtttctcaaataaaataaaaataaaaacaaatactgtgtttcagaagcgccacctattggggaaaattgt

SEQ ID NO: 14617 - protein, 182 aa, Homo sapiens
  ref <308>: DATABASE ACCESSION NUMBER: Refseq / NP_000064
  ref <309>: DATABASE ENTRY DATE: 2002-11-05
MEQGKGLAVLILAIILLQGTLAQSIKGNHLVKVYDYQEDGSVLLTCDAEAKNITWFKDGKMIGFLTEDKKKWNLGSNAKDPRGMYQCKGSQNKSKPLQVYYRMCQNCIELNAATISGFLFAEIVSIFVLAVGVYFIAGQDGVRQSRASDKQTLLPNDQLYQPLKDREDDQYSHLQGNQLRRN

SEQ ID NO: 14618 - DNA, 2226 bp, Rattus norvegicus
  ref <308>: DATABASE ACCESSION NUMBER: EMBL / U07201
  ref <309>: DATABASE ENTRY DATE: 2000-03-04
aagaagcttggcgactgtaaggcgagaggaagcctccagcgggtcttgtcgctgagctacctcagctccacctcctctggccctggcccctagtgcgcagactgcctgcagccctcctgtagcatgtgtggcatctgggccctcttcggcagcgatgactgcctttccgtgcagtgtctgagtgcgatgaagattgcgcacaggggcccagatgcattccgttttgagaacgtcaatggatacaccaactgctgttttggcttccaccggctggcggtggttgaccccctgtttggaatgcagccaataagagtgaggaaatatccttatctgtggctgtgttacaacggtgaaatctacaaccacaaggcgctacaacaacgtttcgaatttgagtatcagaccaatgtggacggtgagataattctccatctctatgacaaaggcggcatcgagaaaaccatctgtatgttggatggggtgtttgcatttatcttactggacactgccaataagaaagtattcctgggcagagatacctatggtgtcaggcctttgtttaaagccttgacagaagatggatttctggctgtgtgttcagaagccaaaggccttgtctccttgaaacactccaccacccccttcctaaaagtggagccctttcttcctggacactatgaagttttggatttaaaaccaaatggcaaagtcgcgtctgtggaaatggtcaaataccatcactgtacggatgaaccactgcatgccatctatgacagtgtggagaaactcttcccaggctttgagatagagaccgtgaaaaacaatctgcgtatcctttttaacaacgctatcaagaaacgcttgatgactgaccggaggattggctgccttttatcaggaggcctggactccagcttggttgctgcctccctgctgaagcaactcaaggaggcccaagtgccctatgctctccagacatttgctatcggcatggaagacagccctgatctactggctgccagaaaggtggcaaattatattggaagtgagcatcatgaagtcctttttaactctgaagaaggcattcagtccctggacgaagtcatatttcccttggaaacttatgatattacgacagttcgagcatctgtaggtatgtatttaatttccaagtatattcggaagaacacagacagcgtggtgatcttctccggagaggggtcagatgagcttacacagggctatatatatttccacaaggcgccttctcctgagaaggcggaggaggagagtgagaggctcctgaaggaactctacctgtttgatgtcctccgtgccgaccgcactactgctgctcacggtctcgaactgagagtcccgtttctggatcatcggttttcttcctattacctgtctctgccaccagaaatgagaattccaaaagatggcatagaaaaacatctcctgagagagacttttgaggactccaacctgctacccaaagagattctctggcgacccaaggaagccttcagtgatgggatcacctcagtcaagaactcctggttcaagattttacaggacttcgttgaatatcaggttgatgatgcgatgatgtctgaggcctcccagaaatttcccttcaatactccccaaactaaagaaggctattactaccgtcagatctttgaacaccattaccccggccgggctgattggctgacccattattggatgcccaagtggatcaatgccaccgacccttctgcccgcactctgacccattacaagtcaactgccaaagcttagacgctctctacactcttgtgtaaaagtcaatgtttcttcctcctgctctgaaggtagagagacattgaaacaatcagagagaatgaaagtcaaccatcagctgctcaggcttatttaggcatggaaagaaataaaagtatcacatctaaaatgcctcctggttgtaggtaccagtgcggccttgtagctagagactgagtggctcttgctgtattgccactgtcgggatgacagtgagctatgctaaggggcatcttagttctgccttcattcctaacagctggctagtcagattgctatgtgagtcctttgtgggaactggtgacaattctgctttgtaggccaaggattcagtttctttctctttctttctttctttctttctttctttctttctttctttctttcttggaattc

SEQ ID NO: 14619 - protein, 560 aa, Rattus norvegicus
  ref <308>: DATABASE ACCESSION NUMBER: SWISS-Prot / P49088
  ref <309>: DATABASE ENTRY DATE: 2002-06-15
CGIWALFGSDDCLSVQCLSAMKIAHRGPDAFRFENVNGYTNCCFGFHRLAVVDPLFGMQPIRVRKYPYLWLCYNGEIYNHKALQQRFEFEYQTNVDGEIILHLYDKGGIEKTICMLDGVFAFILLDTANKKVFLGRDTYGVRPLFKALTEDGFLAVCSEAKGLVSLKHSTTPFLKVEPFLPGHYEVLDLKPNGKVASVEMVKYHHCTDEPLHAIYDSVEKLFPGFEIETVKNNLRILFNNAIKKRLMTDRRIGCLLSGGLDSSLVAASLLKQLKEAQVPYALQTFAIGMEDSPDLLAARKVANYIGSEHHEVLFNSEEGIQSLDEVIFPLETYDITTVRASVGMYLISKYIRKNTDSVVIFSGEGSDELTQGYIYFHKAPSPEKAEEESERLLKELYLFDVLRADRTTAAHGLELRVPFLDHRFSSYYLSLPPEMRIPKDGIEKHLLRETFEDSNLLPKEILWRPKEAFSDGITSVKNSWFKILQDFVEYQVDDAMMSEASQKFPFNTPQTKEGYYYRQIFEHHYPGRADWLTHYWMPKWINATDPSARTLTHYKSTAKA

SEQ ID NO: 14620 - DNA, 31737 bp, Homo sapiens
  ref <308>: DATABASE ACCESSION NUMBER: EMBL / AC005326
  ref <309>: DATABASE ENTRY DATE: 2002-06-05
atgcttcaaatttcccagacttccaatcgctctccaggaagagcccagtctcttttaaggctcacctgattagctaggtcaggtttatccagagtaatcgccctcttttaaggccacctgtgccatattgtattacctaatcatgggagtgataacccatcatatttacaggtcccttccacactcgaaggttggagatcatcttaggattttgcctaccacagaaaccaggcaattcagcagcttgccacagcactggcccagctgtgagctccattgagctgaaacaaaagacatatcaggattcagcacatttctgaggctgtgctatgaagattatgggcatggagattaatgagctacagaagttcttgctcactcaccagattttaaacaaaacttagaggcttacaaagccttatgtaagggagagataccaaaactaaatttcataagattattgaaggaaacaggatcactttataatttctagtttgagattatatatatcaactattcaaaattatgttcttcctataaaagagctgattcttcccttcatcatgaaaataaaagaaatggcaaatgatggctttgcatattgcaaagacaatgctccatctatgaggatcttaagcctcttttttgaactcagtaaaaaatgtatttattacacagaccaaaatgtgtcgcctgctgctggtagctgtcccatctgtccatttccacagctacaactctatttcagttattctctgtctttctcctggactctgcattggcccctcaccagggatttagggtcccttttttcattttttactcaacttgcactcagtcaccaaatttgattcctgttactctgctcctcagccttatctgagcctgtaaaaatcccacctgtttttcccagtccagtaacctccaacctcttggaagtacctagcctctcctctatctaaaataaccctttgttccactttcacctcactacctgttctttgtactgcggatacactaggtagcaagtcccttgaaagcaggaatcttgtctttctcatttgcagagctttctacagaatgagttctctacgatacatttgttgattaaagggatacatttttcattcttctgttttgatactgacttattcttgttgagaatgggaaaaaaataagttctgaaatccactcatacaaaagactttattattgttggccaactgagaattaacttatccatacagtcaagtgcttaatcgtctctttggtagtaagtcagcacttaggaagatgaattaatattctggttactgaggggtcatgtagaattctgcagcagtaagtaaagtacatatgaaatggtgacacatttaagagagcacacaaaagacagaacaataattcatccaatgacttgaaagagtccacaaacatgtctaaacaccaagtttacaagcaagactgtaattgcattggtttacataggcactgagggaaataatatactgggcacccagagtagtagtagtatagtattgcgataatctaagcagtaattgatcatagtcctaagctctgcaggaaatggcaactataggtataactatctaccagagatacatgactgatatgtcatctaccttccaagaatctccactgacccattcttaacccacttaacccactgaaacaaataatttttcatcctgcctttaaaggccttccatgatttgggcctaccttacctgtgtaactatgtctccctcacttaccaagacatgctctcaattctagccatcattgtcttcctgctatcttcaagaatcaccctccacatctttgccaatgatctcttttcttccttagaaagactccttactctcctccaagcctgtcgattgcccatcatcaggatgttcgcaaatcccagctccttcaggatcctttactaacaatgcttgagaatatctgggtattgcatttctgcttgaaaaacatgttggctggtataatatccttgagttacaccttacttccctcagaatagagatttctccagtgcctctaaaatttgcaatattcaattgagaaatctgataatcaacttttttttctctttgtagatgatttgattgttgtgcctggatgcttagagtgttcttcatccttaaggtacaacattacaactagaatatgttcatgttgagtgttatggatgaaatttacttgtaattcattagtattttcaatcagaatttttattctttatcgtagggatattttctcatatttttaatacttattttactttcatgtgttctctacttaaaagatgtctgccattcttatgttggatcttttctgtcctcaatacttattagtttctctaattgttttaatctttttgtctttttattaactttatctgtgattattcatttctccttgtcattattttcagtatcagctatattaattctgtttcttgacatttctgtacatttattagttctgttattttgagatttgatcctcaaattgtttccttgggtttggaaattttcttttaatctcattttgttgtattagcatcttatttttgagctctatatcagattcaaatttttattaggttgttctatagtgtaaagcaaatgctccttgcttgatattttcttttagaatgaattggctatcttttgcatacttgcttatttccttttttattttgctgtcaaatgtttgtatagtttccattccatttatttagatattactcacttagtttgctgataattttccttcttcttaccatgcccagatccatttataccctcctctgacatgctctgtgaccaaggaggctgacttacattgatttcattaccacagcagactcctgtgccctctggctttttattgggttctgccaacaggaagaattggcaggaggttggaagatggaaagagggaaaagtctaggcacttatccccactcctttcctgccttgccatggtcttacgatgaccacatccctctactgttgcagcttctgcctggtggcctctcttccacggctccatcactgacatgactccactagcacaattctttctcctcttctctttaggaaatatctttctggctctgctagtctccagtgcttctccatctcctattggtttccttaacatcattcaaattttggtaagtagtttcttccttaaatgcttttcagttaaaacctttgagtttgccatcatttttgctaggaccctagctgatacacttagacagctttggccaggcattgtacgtgctttggtatattatgaatggctttttgaatcctgtcttaatttgggtaatcagaagcatatcctacggcaaatattccatagcaagtaatttatttgggaagtgtaaaagtccagcagggagtagagaaatgagctagaagggaagtcactgaataaagggtgtgtctataaggctagccactactggaggcaactggagcttaattcctcgggtagattctgagaaataactcaaaatatgctcctcaaagttatccaacccaaggagcaaagttgctcacgtgctcatacatcaactgctatcagtcatttggtcaaggccggctctcagaggagcgctaactctcccctgccccgccccgaccccacagtcaggaagcctcctgtaaattcagaggaggccttaaggaaaagagttaaagatactggcaaaaggtagactggtagtgctctgaaggatgtgggcaaaataccatagctagaaaagctatgattgtctgctatgatttttccccaaatatgaaaccagtttttctttactcttagggatacagtctaagagctgagtattttaagtctatccacttgtctgtaatttgaaggaatggcagtgattaaatggtaggtaggaaggagaagaatatgacttaggcaatgttctttatttattgcaatatcctggctccattctctcttctgagttttcataagggctttttaccaggtttcactccacttacttccatgtgtgaaggttgacagcaggcagtgggatggggctgggaggaattagaggtggggaaggaggattgcagaggtggctccagcatgttccctgttcaacatgtgaccttagagcattgatttttatcaccaagaatcagttccatagtacactttacatattgcatctatttcttcccagatgttttcactactcaccagtcagagggaaaaaaacataaagatgcccagtgatcttttttagacctaaaccattggtaatattaaaggatacttattaaaagagggtacaatcaggactcacatagatataaaataaatgcatgccaaagattttatttaaatcattaattaatgaaggaacctataaggtgttaaaacctgttcacctggataatatcctgcacagtgttttccaacttggttccattctccccgtcactttcaggtacaccaatcagatgtagatttggtcttttcacatagtcccatatatcttggaggctttgttcgtttctttttattcttttttctctaaacttcccttcttgcgtcatttcattcatttcatcttccatcactgataccctttcttccagttgatcgcatcggctcctgaggcttctgcattcttcacgtagttctcgagccttggctttcagctccatcagctcctttaagcacttctctgtcttggttattctagttatacattcgtctaaatgtttttcaaagtttttaacttctttgcctttggtttgaatttcctcctgcagctcggagtagtttgatcgtctgaagcctccttctctcaactcgtcaaagtcattctccgtccagctttgttccgttgctggtgaggaactgcgctcctttggaggaggagaggcgctctgctttttagagtttccagtttttctgctctgttttttccccatctttgtggttttatctacttttggtctttgatgatggtgatgtacagatgggtttttggtgtggatgtcctttctgtttgttagttttccttctaacgacaggaccctcagctgcaggtctgttggagtttgctagaggtccactccagaacctgtttgcctgggtgtcagcagcagtggctgtagaacagcggattttcgtgagccacgaatgctgctgtctgatcgttcctctggaagttttgtcgcagaggagtacccagctgtgagaggtgtcagtctgcccctactggagggtgcttcccagttaggctgctcgggggtcaggggtcagggacccacttgaggaggcagtctgcccgttctcagatctccagctgcgtgctgggagaaccactgctgtctgcaaagctgtcagacagggacatttaagtctgcagaggttactgctgtctttttgtttgtctgtgccctgcccccagaggtggagcctacagaggcaggcaggctccttgagctgtggtaggctccacccagttcgagcttcccggctgctttgtttacctaagcaggcccgggcaatggcgggcacccttccccagcctcgctgccgccttgcagtttgatctcagactgctgtgctagcaatcagggagactccgtgggcataggaccctccgagccaggtgagagacataatctcgtggtgcgctgttttttaagcccgtcagaagagcgcaatattagggtgggagtgacctgattttccaggtgcgttctgtcacccttttctttgactaggaaagggaactccctgaccccttgcacttcccgagtgaggcaatgcctcgccctgcttcgtctcacgcacggtgcgctgcacccactgtcctgcacccactgtctggcactccctagtgagatgaacctggtacctcagatggaaatgcagatatcacccgtcttctgcgtcgctcacgctgggagctgtagaccagagctgttcctattcggccatcttggctgccccaaactagcaaggcaggccaacattcagattcaggaaatacagagaatgccacagatactcctcgagaagagcaactccaagacacataattgtcagattcaccaaagttgaaatgaaggaaaaaatgttaagggcagccagagaaaaaggtcgggttacccacaaagggaagcccatcagactaacaacggacctcttggcagaaactctacaagccagaagagagtgggggccaattttcaacattcttaaagcaaagaattttcaacccagaatttcatatccggccaaactaagcttcataagtgaaggagaaataaaatactttacagacaagcaaatgctgagagattttggcaccaccaggcctgccctaagagagctcctgaaggaagcactaaacatggaaaggaaaaaccggtaccagccactgcaaaaacatgccaaattataaagatcatcaaggctaggaagaaactgcatcaactaacgagcaaaataaccagctaacatcataatgacaggatcaaattcacacataacaatattaactttaaatgtaaatggactaaatgctccaattaaaatacacagactggcaaattggataaagagtcaagacccatcagtgtgctgtattcaggaaacccatctcacgtgcagagacacacataggctcaaaataaaaggatggaggaagatctaccaagcaaatggaaaacaaaaaaaagcaggggttgcaatcctagtctctgataaaacagactttaaaccaacaaagatcaaaagagacaaagaaggccattacataatggtaaagggatcaattcaacaagaagagctaactatcctaaatatatatgcacccaatacaggagcacccagattcataaagcaagtcctgagtgacctacaaagagacttagactcccacacaataataatgggagactttaacaccccactgtcaacattagacagatcaacaagacagaaagttaacaaggatacccagcaattgaactcagctctgcaccaagtggaccaaatagaaatctacagaactctccaccccaaatcaacagaatatacattcttctcagcatcacacaacacctattccaaagttgaccacattgttggaagtaaagctctcctcagcaaatgtaaaagaacagaaattagaacaaactgtgtctcagaccacagtgcaatcaaactagaactcaggattaggaaactcactcaaaagtgctcaagtacatggaaactgaacaacctgctcctgaatgaatactgggtacataacaaaatgaaggcagaaataaagatgttctttgaaatcaacgagaacaaagacacaacataccagaatctctgggacacattcaaaggagtgtgtagagggaaatttatagcactaaatgcccacaagagaaagcaggaaagatccaaaattgacaccctaatatcacagttaaaagcactagaaatgcaagagcaaacacattcaaaagctagcagaaggcaagaaataactaaaatcagaacagaactgaaggaaatagagacacaaaaaaaccttcaaaaaattaatgaatccaggagctggttttttgaaaggatcaacaaaagtgatagaccactagcaagactaataaagaagaaaagagagaagaatcaaatagatgcaataaaaaatgataaaggggatatcaccactgatcctacagaaatacaaactaccatcagagaatactacaaacacctctacgcaaataaactagaaaatctagaagaaatggataaattcctggacacatacaccctcccaagactaaaccaggaagaagttgaatctctgaatagaccaataacaggctctgaaattggggcaataatcaatagcttaccaaccaaaaagagtccaggaccagatggattcacagccgaattctaccagaggtacaaggaggaactggtatcattccttctgaaactattccaatcaatagaaaaagagggaatcctccctaactcgtttaatgaggccagcatcatcctgataccaaagctgggcagagacacaaccgaaaaagagaattttagaccaatatccttgatgaacattgatgcaaaaatcctcaataaaatactagcaaaccgaatccagcagcatatcaaaaagcttatccaccatgatcaagagggcttcatccctgggatgcaaggcaagttcaatatatgcaaatcaataaatgtaatccagcatataaacagaaccaaagacaaaaccacatgattatctcaatagatgcagaaaaggcctttgacaaaattcaacaacccttcatgctaaaaactctcaataaattaggtattgatgggacgtatctcaaaataataagagctatctatgacaaacccacagccaatatcatactgaatgggcaaaaactggaagcaatccctttgaaaactggcacaagacagggatgccctctctcaccactcctattcaacatagtgttggaagttctggcaagggcaattaggcaggagaaagaaataaagggtattcaattaggaaaagaggaagtcaagttgtccctttttgcagatgacatgattgtatatctagaaaaccccattgtctcagcccaaaatctccttaagctgataagcaacttcagcaaagtctcaggatacaaaatcaatgtataaaaatcacaagcattcttatacaccaataacaaacaaacagagagccaaatcatgagtgaactcccattcacaactgcttcaaagagaataaaatacctaggaatccaacttacaagggacgtgaaggacctcttcaaggagaactacaaaccactgctcaatgaaataaaagaggacacaaacaaatggaagaacattccatgctcatgggtaggaagaatcaatatcgtgaaaatggccatacgcccaaggtaatttatagattcaatgccatccctatcaagctaccaatgactttcttcacagaattggaaaaaactttaaagttcatatggaaccaaaaaagagcccgcatcgccaagtcaatcctaagccaaaagaacaaagctggaggcatcacgctacctgacttcaaactatactacaaggctacagtaaccaaaacagcatggtactgctaccaatacaaagatatatatcaacggaacagaacagagtcctcagaaataacgccacatatctacaactatctgatctttgacaaacctgagaaaaacaagcaatggggaaagggttccctatttaataaatggtgctgggaaaactggctagccatatgtagaaagctgaaactggatcccttccttacaccttatacaaaaatcaattcaagatggattaaagacttaaacgttagacctaaaaccataaaagccctagaagaaaacctaggcaataccattcaggacataggcatgggcaaggacttcatgtctaaaacaccaaaagcaatggcaacaaaagccaaaattgacaaatgggatctaattaaactaaagagcttctgcacagcaaaagaaactaccatcagagtgaacaggcaacctacagaatgggagaaaattttcacaacctactcatctgacaaagggctagtatccagaatctacaatgaagtcaaacaaatttacaagaaaaaaacaaacaaccccatcaacgagtgggtgaaggatatgaacagacacttctcaaaagaagacatttatgcagccaaaagacacatgaaaaaatggccatcagagaaatgcaaatcaaaaccacaatgagataccatctcacaccagttagaatggcaatcattaaaaagtcaggaaacaacaggtgctggagaggatgtggagaaataggaacacttttacactgttggtgggactgtaaaccagttcaaccattgtggaagtcagtgtggtgattcctcagggatctagaatgagaaataccatttgacccagccattccattactgggtatatacccaaaggactataaatcatgctgctataaagacacatgcacacgtatgtttactgcggcactattcacaatagcaaagaattggaaccaacccaaatgtccaacaatgatagactggattaagaaaatgtggcacatatacaccatggaatactatgcagccataaaaaatgatgagttcatgtcctttgtagggacatggatgaaattggaagtcatcattctcagtaaactatcgcaaggacaaaaaaccaaacaccgcacgttctcactcattggtgggaattgaacagtgagaacacatggacacaggaaggggagcatcacactctggggacagttgtggggtgggaggaggggggagggatagctttaggagatatacctaatgcttaatgatgagttaatgggtgcagcacaccagcatggcacatgtatacatatgtaactaacaggcacactgtgcacatgtaccctaaaacttaaagtataataataataaaataaaataaaataaatgcaagagggaatattactactgaatttacagaaacaaaaagaattataaaaatgtactatgacctaaagtactatgaatttgtgtgccaacacattggataacctacccactccatattcttagcacaatagattataatttgtttccccaaatataaataatgtcttctatgttctatatatatatatatatatatatatatatatatatatacctgttcaaattagaattcaaaatatcacctacatacaggcagataagaaatgctaaaatgaatttatacatagatacaaaacctagtgaaactggtcagaatccacaaggcaataatcaattgcatggcactggacatttctggaaaaatacttttacagaaaaaaagcatttgcattactatcacttccctacaaattatagacttgtaatgtaattcaaaaacagtgaaaggcagagataacctggaagacagcactagacaggacagtaagtaaaatctttaatggtttttctttttttaaaatctatttcaaagaacttcacaattttttctgacagttcagtattgtcagagtttagcagactcacttgtatgctttctggagcatggaggttaagaacttacgttgctctgctgttctgtctgcataagaatacaagagccttttgcttcttcctcaggtgccaagcttgttgatggtggtggctgtggttgattgtattaccttatgcctctttttgtttggttgttgtggatgattttcttcctgctatttggtatttatttttgctaattgtgtgaagtattagagatggatgattttgtaacttattttcagtctattatcctaactagaagcttctcctaaaaacactaacccacattgacctccccatttacttgcttctgaaacaaaaattatattacacattttgataataatattatcttggagagtggtatgactgtgtgtccttttaacctgtacattcaggacaaaagtcaaagccaaagccaaattctttgagtaattcaaggcccctgctgcttccccagatttagcccagcttcaaggatcactgaaacactaaggggatgctcccaggtcattcttctactcactgctttcattcagccatttctaaatctgagtactcaggatattttgactcgtgcactttcctcaaatcctaattctgaggatgtcactgctgtctaactgtaattctcctctgcaggaaatttaatactatttccttttattcctgtagccaaaccattcctcatgtcatattgagaaatttctctcaaaatctaaagtaaataaccaaggaaaagatctgttcatgacatacagttaaactgcacttgacccaaccagtggattttgtctggaatataaattctcaaactggctttccataagcctaataaagctgaggttatttttctgtctaccacaaaaagttcaagttttattttcaaatttctcaatgtttaaccagtgttaaggaaaattcttataccaactctgcccgttatacaatgatatcaaatgatttctcattattggagggtggagccaagatggtcaaataggaacagctccagtctacagctcccagcatgagcgatgcagaagacaggtgatttctgcatttccaactgaggtactgcattcatctcactggggagtgtcagaaagtgggtgcaggacagtgggtgcagcgcaccgagcatgagccgaagcagggcgaggcatcacctcatccggaaagtgcaagggtcagggaattccctttcctagtcaaggaaagcagtgagagacggcacctggaaaatcaggtcactcccaccctaatactgcacttttccaatggtcttagcaaacggcacaccaggagattatatcccacgcctggctcagagggtcctacgcccacggagccttgctcactggtagcacagcagtctgagatcaaactgcaaggtggcagcaaggctgggggatgggcgcccaccattgccgaggcttgagtaggtaaacaaagccgctgggaagctcgtactgggtggagtccacctcagcttaaggaggcctgcctgcctctgtagactccacctctgggggcagggcatagccaaacaaaaggcagcagaatcctctgcagatttaaacatcactgtctgacagcattgaagagagtagtgattccctagcacacagctggagatctgagaatggacagactgcctcctcaagtgggttcctgacccccaagtagcctaactgggagacaacctgcagtaggggcagactgacacctcacacggccgggaactcctctgagacaaaacttccagaggaacgatcaggcagcatcatttgctgttccccaatatccgctgttctgcagcctccgctggtgatacccaggcaaacagggactggagtggacctctagcaaattccaacagacacgcagctgagggtcctgactgttacaaggaaaactaacaaacagaaaggacatccacaccaaaaccccatctgtatgtcgtcatcatcaaagaccaaaggtagataaaaccacaaagatagggaaaaaacagagcagaaaaactggaaactctaaaaatcagagcgcctctcctcctccaaaggaatgcagctcctcaccagcaacagaataaagctggatggagaatgacttcgatgagttgagagaagccttcagatgatcaaactactctgagctaaaggaggaagttcgaacccatggaaaagaagttaaaaaccttgaaaaaaaattacacatatggctaaatacagtaacaaatgcagagaagtccttaaaggacctgatggagctgaaaaccacagcatgagaactaagtgacaaatgcacaagcctcagtacccgattcgatcaactggaataaagggtatcagtgatggaagatgaaatgaatgaaatgaagccagaagagaagtttagagaaaaaagaataaaaagaaatgaacaaagcctccaagaaatatggaactatgtgaaaagaccaaatctacgtctgattggtgtacctgaaagtgatggggagaatgcaaccaagttggaaaacactctgcaggatattatccaggagagcttccccaatctacaaggcaggccaacattcaaattcaggaaatacagagaaggccacagatactccttgagaagagcaactccaagacacataattgtcagattcaccaaagttgaaatgaaggaaaaaatgttaagggcagccagagagaaagggaagccgatcagactaacagctgatctctcggaagaaactctacaagccagaagagagtgggggccaatattcaacattcttaaagaaaagaattttcaacccagaatttcatatccagccaaactaacttcataagtgaaggagaaataaaataccttacagacaagcaaatgctgagagattttgtcatcgccaggcctgccgtaaaagagctaaaggaagcactaaacatggaaaggaacaaccggtaccagccactccaaaatcatgccaaaaagtaaagaccatcgaggctaggaagaaactgcatcaactaacgagcaaaataaccagctaacatcataatgacaggatcaaattcacacataacaatattaaccttaaatgtaaatgggctaaatgctccaattaaaagacacagactggcaaattggataaagagtcaagacccatcagtgtgctgtattcaggagacccatctcacatgcggagacacacataggctcaaaataaaaggatggaggaagatctaacaagcaaatggaaaacaaaaaaaggcaggggttgcaatcctagtctctgataaaacagactttaaaccaacaaagatcagaagagacaaagaaggccattacataatggtaaagggatcaattcaacaagaagagctaactatcctaaatatatatgcacccaatacaggaggacccagattcataaagcaagtcctgagtgacctacaaagagacttagactcccacacaataataatgggagactttaacactccactgtcaacattagacagatcaacaagacagaaaattaacaaggatatccaggaattgaactcagctctgcaccaagtggacctaatagaaatctacagaactttccaccccaaatcaacagaatatacattcttttcagcaccacaccacacctagtccaaaactgaccacctagttggaagtaaagctctcctcagcaaatgtaaaagaacagaaattataacaaactgtgtctcagaccacagtgcaatcaaactagaactcaggattaagaaactcactcaaaattgctcaagtacatggaaactgaacaacctgctcctgaatgaatactgggtacataatgaaattaaggcagaaataaagatgttctttgaaaccaatgagaacaaagacacaacatgccagaatctctgggagacattcaaagcagtgtgtagagggaaatttatagcactaaatgcccacaagagaaagcaggaaagatccaaaactgacaccctaacatcacaattaaaagaactagaaaagcaagagcaaacacattcaaaagctagcagaaggcaagaaataactaagatcagagcagaactgaaggaaatagagacacaaaaaaaactttcaaaaaatcaatgaatccaggagctggttttttgaaaagatcaacaaaattgatagaccgctagcaagactaataaagaagagaagagagaagaatcaaatagacgcaataaaaaatgataaaggggatatcaccactgatcccacagaaatacaaactaccatcagagaatactataaacacctctatgcaaataaactagaaaatctagaagaaatggataaattcctggacacatacaccctcccaagactaaaccaggaagaagttgaatctctgaatagaccaataacaggctctgaaattgaggcaataattaagagcttaccaaccaaaaaaagtccaggaccagatggattcacagccgaattctaccagaggtacaaggaggagctggtatcattccttctgaaactactccaatcaatagaaaaagagggaatcctccctaactcattttatgaggtcagcatcatcctgataccaaagcctggcagagacacaacaaaaaaaagagaattttagaccaatatccctgatgaacatcgatgccaaaatcctcaataaaatactggcaaaccgaatccagcagcacatcaaaaagcttatccaccatgatcaagtggacttcatccctgggatgcaaggatggttccacatacgaaaatcaataaacgtaatccagcatataaacagaaccaaagacagaaaccacgtgattatctcaatagatgcagaaaaggcctttgacaaaattcaacaacccttcatgctaaaaactctcaataaattaggtattgatgggacatatctcaaaataataagagctatttatgacaaacccacagccaatatcatactgaatgggcaaaaactggaagcattccctttgaaaactggcacaagacagggatgccctctctcaccactcctattcaacatagtgttggaagttctggcaagggcaattaggcaggagaaagaaataaagggtattcaattaggaaaagaggaagtcaaattgtctctgtttgcagatgacatgattgtatatctagaaaaccccattgtctcagcccaaaatccccttaagctgaaaagcaaattcagcaaagttgcaggatacaaaatcaatgtgcaaaaatcacaagcaatcttatacaccaataacagacaaacagagagccaaatcatgagtgaactcccattcacaattgcttcaaagagaataaaatacctaggaatccaacttacaagggacgtgaaggacctcttcaaggagaactacaaaccactgctcaacaaaataaaagaggatacaaacaaatggaagaacattccatggtcatgggtaggaagaattaatattgtgaaaatggccatactgcccaaggtaatttatagattcaatgccatccctatcaagctaccaatgactttcttcacagaattggaaaaaactactttaaagttcctatggaaccaaaaaagggcctgcattgccaagtcaatcctaagccaaaacaacaaagctggaggcatcacactacctgacttcaaactataatacaaggctacagtaaccaaaacagcatggtactggtaccaaaacagagatatacaccaatggaacagaacagagcactcagagataataccacacatctacaaccatctgatctttttgacaaatgtgacaaaaacaagaaatgaggaaaggattccctatttaataaatggtgctgggaaaactggctagccatatgtagaaagctgaaactgcatcccttccttacaccttatacaaaaattaattcaagatggattaaagacttaaatgttggatctaaaaccataaaaaccctagaagaaaacctaggcaataccattcaggacataggcatgggcaaggacttcatgtctaaaacaccaaaagcaatggcaacaaaagccaaaattgataaatgggatctaattcaactaaagagcttctgcagagcaaaaaaaactaccatcagagtgaacaggcaacctacagaatgggagaaaattttcacaacctactcatctgacaacgggctaatatccagaatatacaaagaacacaaacaaatttataagaagaaaacaaacaaccctatcaatgagtgggcgaaggatatgaacagacacttctcaaaagaagacatttatgcagccaacagacacatcaaaaaatgctcatcatcactgaccatcaaggaaatgcaaatcaaaaccacaatgagataccatctcataccagttagaatggcaatcattaaaaagtcaggaaacaacaggtgctggagaggatgtggagaaataggaatgcttttacactgttggtggtactgtaaactagttcaaccattgtggaagacagtgtggtgattcctcaaggatctagaactagaaataccatttgacccagtgatcccattactgggtatatacccaaaggattataaatcatgctactataaagacacatgcacacgtatgtttattgcggcactattcacaatagcaaagacttggaaccaaccccaatgtccaacaacaatagacaggattaagaaaatgtggcacatattcaccatggaatactatgcagccataaaaaaggatgagttcatgtcctttgtagggacatggatgaaattggaagtcatcattctcagtaaactatcgcaaggacaaaaaaccaaacaccgcatgttctcactcacaggtgggaattgaacaatgagaacacatggacacaggaaggggaacatcacacaccggggcctgttgtgaggcggggtgagtggggagggatagcattaggagatatacctaatgtaaatgacaagttaatggatgcagcacaccaacatggcacatgtatacatatgtaacaaacctgcacgttgtgtacatgcaccctagaacttaaactataataaaaatacataaaaaaagagtagttgtaccaatatgcatgctcaccagcactgaatgagagttgccacagctctgcatctttggcagcagttagtattatcagtctttctagcttctgccaatttaattggctcatttggcagtattcagtagcacttctgttctttcatttttttttttttttttttgagatgaagttttgctcttgcaggctggagtgcaatggtgcggtctgagctcatcacaacatctgcctctcagattcaagtgattctcctgcctcagcctcccgagtagctgggattacaggcatgagccaccacgcccagctaattttgtatatttagtagagatggggtttctctgtgttggtcaggctggtctcaaactcccgacttcaggtgatctgcccaccttggcctcccaaagtgctgggattacaggcgtgagtcaccgcacccagcccgcacttctgtttttttttttcttacccatttcctctattggattgacttccttttccttatttattcataagggttctttatctcttctggacactaaccccttgttagttaaccagggttctgaaaataggttttcccatttaatggcatatgctgcccccctcttgatggcacctttgatgtctgtaagtgagataatgctggttggttggttggttgagggttgggtaaaaagggttgacagggaatagtaaaaagcttggggtgggaagaactagaacaagaagtcatagtggcaaatagagtcagtgtctggtatgaggttagaataagctggcctgggcaacatttaagtataagtgaagatgacaccaaattacacccaggtgttttcctctagacacctgatctacattattttcctttgaatgtaatgtttacttacattttttaagttagctatattagggggatttttgtaaggaagaaaagcatgcttgcctccaccctagagaccttccagaaggcacactcacaaacttatggcaacatcctctacttgcagatttatctctatagaagcaggtgaatccaaggaaagtgaaatcttcacatctaagcataaagtgtgactgtggaaaatatagtggggcttaaggtctggttttattgtttcatttttattctgtttgtttatgacaaatgagcattcgttcatcttatgtattttttccttgtagtcttcctcccatctcctttataagttcctattatattgcatcatcagagctatacattaattcacaaacgttttgagcaccaaacaagtgctgggttgtccactaccactggtaataaaacaataaataaaactgttcactcccctcaagaagctcaccccctaattacaggaatgagatatatctcatattctgggtgaaaacaaggtgctatgaaagcaaataatacggatatccaactcaatctagttcaatctcattgcctcattctgaaagttagttctccaataacatttttgaaaaaattcattcctccaaacctcccccaaaaccctggcaaagactgatcttttttattgtctccacatttttgccttttccagattatcatgcagttgaaattatacagtaggtaggcttttcagattgacttctttcatgtagcaatatgcatttaagttcttccatgactttgtgtggcttcatagctcatttttttaaaatcaatgaatagtatttcattgtctggatatacaatttgtttatccattcaccttgtgaaagacgtcttgtttgcttccatgttttggcaattatgaataaagtttctctaaacatctgtgtgcagttattggtgtggaaataagtttttaacacatttggagaaattccaaggagcacaattgctggattctgtggtaaaagtatactgtatttatttttgtaagaaactgcaaatggtcttccaaagtggctataccattttgcattcccaccagcaatgaattagatctcccattgctccacatcttcaccagcattcagtgttgtcagtattttggatttgagccattctaataggtatatagtggtatctcattgttgatttaagccccaaaacatttttgtttctgaagaagtaattgacttctctaactacaagctttgttagactcttaatcagagtgtttgaaggaattttaaaaccctctcataagttaatatgaaaaagcaaaaggcaaatgataataatcaagataaatatgtaaaataagaataaactctgaggaaaatatctatgtataatttggtgcctttttcacctatgtttacttaaatgctgtccaactcagcttcatctaaacttatgtcagaaaaaatccctgagtttaaaagatttaactccaattttgaaggaatttccatggtgagtataataccatcaaacaatattgcatgctataaaaaaaccttttgtgaaaggaagcatcagtcgatgtggcaaacttcattgttgtcttattttaagaaattgccacggccatcctattcttcagcaaccaccactgtgatcagtcagcagccatcaaacattgaggcaagaccctccaccagctaaatgattatgatttgctaaaggctcagatgaatgttagcattttttagcaatagcgtttttaaatttcaaaaaaccctaatattaagatttattataaaagctatagtaaataatacctagtagttctggcattagaatagacaagtaaatagtgcagaatctcaatgctgtaacgtacctactgatatatagaaacaggctgccttcacagatcagtgggaaaatgatggacttttcaacaattgtgttaggacaatgggtcatccatatttaaaatgttatttagtagttcacattttatatacaacaacaaatttcaatggattgaggactaaatttaaaaatcaaaactttaaaacttaagaaaatttggaagaacatctttataaccctaaggtagaaaagcacaatctaaaacaaaagatcagcaaattcaactaaattaaacaatgcctatttatagagagacaccataaaataaaaaagaagccactggttgttacgtataaactgataaagaactggagtctagaataaataaataactcctacgagttaataactgccccttacaattattgggacaagttttagatgcacaaattctatggtctagaatttccactcttaggcatttaccctagaaaaactcatatacatcaatcagtaggaggataaataacgaattgtggaatatttattcaatggaatactatgcaacaattaaaatgggtaaatctcaaaaacataatgttgagcagaaataagtgagctttgcagaaagtatatatccttaattaaaaaaaatttttttgagatggagtctcactctgtcacccaggctgaaggacaatggcatgatcttggatcactggaacctccacatcccaggttcaagcaaatctccttcctcagccccctgagtagctgggattacaggtgcacatggccatgcccagctaatttttgtatttttagtagaggcagggtttcactatgttggccaggctggtctccaactcctgacctcaggtgatttgcccgcctcagcctcccagagtgccaggattacaggtgtgagccaccacacccgaccaataaatttttaatatgtaaaacaatactatatacattgacacctacatatgtcatagaactctgatgctagcagcaatggtaaacatgaaattcaggatagtgcttacctctggacaggggcctcaacagtatgtgtactatgttattttctgagctgagtgatgtgtatataggagtttattaggctcttaatccttgtttctatgcctgaaatagttcatatttaattgaattaaaggttaaaaatctattttttacaaaaaaaggagagcctaaaatggatactgtgagcagggcaggccatctaaaagactcctctgcgaagacctggacaagactccaccctcctccaggtgcacactctacacccagttacactgactccatcagatatgaccatgctcctgacttccattgcaggatcattcccttgacctagagcctggctcctccttcctcatatttgccttcaggtaacactactcctagtatgctattccttctgccccctactcagctattcccaccccacagcatctccttgtcctgccaggctcctgccaaaagaaactctagctattcccacttttctcgggtacatctcaatttcataaaactcaacttcaagagccatattttacagacatttctgaaactattaatgacatggcgttaataaaacatccctcccagcacgagcatttactgaatgttcacattcctgagcttctgatggtgtctgcagagttatttattttcttgaatagtccttgttcatgtacacagcttgctttcccatttgatattctgcttaaatatctataactccatgtttaatgattaagtgtaaaaatgctccaactctctattgccaccattgcaactattttcccatactctgcaaaatactcaaagcagaactagcatttggtgaaattatgccgtaatatatcatctttaagagtgttttgctgcacaacactcctgcattactaccaaaggacgttgtgagttttggatacgtttgaattccctgaaaattggcaaggatattttacagggaaatttttggtccgagttactcaaactaagtgatgttgccacacccaatatgcacagagaaagaaaaagaggttaacctaagacaacaaagaaaaattttacgtattaaaaaaaaagattagtggggacaaatattcaaaatgaagctcgacaacagaaaagaccctaatcaaagtgttgggaccctcaaattttgaggtaactaacaagtcgagttctgatgtatcaccaacccttcccctgtgaccacacattcaccaccttttctgttcctcttctcattcccagtaactccccatctcactgtgtccctgtgtcctcattctgcccccgactaaaatgagttaccatggctgtgcctacctggccttactcttactgaacatttcttaatacccagaatctgtccttcccttctaggccaccctctaaacttacctgctctgtgtaccttccacaagggcttgttgtattagtctgttctcacactgctataaagacatacctgagactgggcaatttaatgagaaaagaggtttaatcagcttacagttctgctggctgtacaggcttccgcttctggggaggccttgggaaacttacaatcacggcagaaggggaaacaggcatggtcttcaagtggccagagtaggggtggggatgtgctatacacttttaaacaaccagatcccaggagaactctatcacaagaacagcaaggaggaagtctgcccccacgattcaaacagctcccaccaggaccctcctccaacactgggaattacaatttgacatgagatttgggtggggacacagagccaaaccgtatcactcatttgctttcacaatggaaactcatccactcttaagtaaccaatggaagatgaaagcttgccatcttaccttttatggacatttacatgagctctaatccaaataaatgaatctatggtggcaaaattttacatgccataaaaggcagctaggagagagattttggaggctaaaggtgctttctttggtgcttctgtttctctaagtcatacctgctgagtaactgataactccatctgctcctgaagccatgtagaatgtcggtcttgcaggagtgggtagagtcctgtttctatgttcattttttgtggttaccaacccaggaagacctggattatgctgtgctcccatgggacacgatggaccatccccaactctctgcctttaactcaggtctaacctcccaggacagccagctcccaggataggcagctaaaaacactcaggcatcttggctgctgagtgctcaccttaggccacactggatctcccttccacatgggcctccacagtctaccagctccgcgcatggttggcttcctgtttgagactttagcgctttggttttggtgttcttctctccagctcaaatgtgatctggcctcatactttatccttatacaatgtctagctgcccccagatatccatctcagctgagtcaaacctaaccttgagacaaccctagaaccagactatttggctggtgcttctcactggcctcctcgattccccaccctaatccctgaaggtagagcacagttcttcagttctgtctctgttataggaacggacaaggacagactttgacatgagtgcaggaagtggttatctccacagtgattatttgtatggtctaatttgagatgccattttacagaaaagtggttaggagccccaaccctggagttggaccgccagggttcaatgtccaagtctgttacctattagctgtttaacactgggaaacttccttgttttgtgggaatgacaattgcacttgcctcagaaaatagtagttaagattaaatgagacatacaaatactgtgtctagcaaagtaactgacatctagtagtggtcgacatattagctaatactattattattatgatcaccaagtgttctagggcctgtgcttccactgtgagagattcactcctttatcagcccctcctcaggcccatgacactaattcacagtggactttgtccttgacaagaggactgtaactgccaggaaacttgaggatggaagtgggtgggaaaagttgaagaaagcaaagaggaacagacagagaaggctgagaatattaaagatgaactttgtctaatccacagtgtgtcagagctgatgctcctgacaggttggggcctgaatctgttactgagaatgaaaggggagattgtatgttgggtagataactattatggtacttctgtgttaaactactccaggaacacgattcacgagagatatgtgtagtaggagtgccaatacataaaacacaaggtgaagggtgccttctggagttgtgtgacaggttggccctgaactagcaaatattcacaacactccttgacatccatcccacaatcacccctctagctccacaccattgccaaaacccactccaaagtgaagaatgaataatctaagccagtggttctcaactgagagtgattttaacaccaggggaacatttgttggtcacaagttgaggggaggttactactatcatgctaatgtcatctcatgaatacagcccagaagtgtcgctaaacactgtcctgacaatgcaaagaataacccccacaacaaagaattacccagccttaaatgtcaatagggctggggttgagaaactctgctctaaggccattcaatcatggtgatctttctccttgccagtgaatagttcaggtgttgcaggggtggaaactgaagaaaaggcaaagtttgtgcaagggttgcaacggtggcaatccataactccataggtgaagtgaccttaagatgatcaattagccccattcacactccggccttaaggaattcgcagaaaactgaagttctacatccattttgcctaagtcttgaggggtagagaagccccttactgacatttaagttgcatttctatatttttaagtatatgttagttctagaaaaacatatctatagtcagctccctatcaatcaaaaaataatgtgtcctctgttactaaagccttggtagatataaatgtgagatatgcttagttttgttctctacatcctgactttcctgggacttgaacctagtcaagacttcatccctccatttttccaggcactaaacaaaaccacagacttcttgaaaatagagtcttcatcttccttacatttttattcccatatccgaaactaagcctggtacataaaaagcacttgaaaagatttgttgaagactgaatgagggaacacataaatgaatatattctggaatttcgatcccaacttattttgctgtgtttctcctaagagtaggtatcatctccacttgtatacatctactggtatctgatatcaaagatgactccaatgtatcaatttcctattttttcataggaagttttcacctatctccttgcatttctacttagcatacttgtttgtctcttgcccatcattctcttcccaagcctcatgaaattcgtgaaagccctggccagttttctgtcatctttatgttgaagctctggtcaagaaaagcctctcattcgctacacccactgttggagctgctccacaattttcccaggcagaagagcctctccccaagtctggtctagccccagggcaaagccttgcctgaagtgagcctgggtgttttcccacctctgtgagtacttgctgctcacccactttccatccacagtggtcacaaatccccagaatatttatctctttggctttcttctttgatgattttctccaccctatttagaaacccttcatcctctttaaccagaggaagagagaaaggtgtgcttctctgcacatctaattatctaatttttttttcatatcttagattctcttgcatagctatggaaggaagaaagccctgtgttctctctagtttcttcctattaataccaccctctacctcaagtattatttgaatatcattgtttgaaaccagacttattacttagcctaaaattgagagcacatatttagactacttaatcagattaggttaataaatatgtatttttaaactgtacttgaacactctaaatactgaggagtttaagcaagcaaaaatatgtaaataaatgttaaatttagagaaagtttaatacaatgcatgatgttacaactaagcagacagaataagcccaaattaaagaagtaatgatgtaacgtacttagtgcattgaaagtgaatggaatttctaagtgtcactgtcttggtaaaaacagcaatttattccttatcccctctccccagtctaaggagtgagagatttgcttgatagaagcagaggatacagatggtataataaagtcttacactatttgttgatgagaacttttatgcctcatcgtctgccccatatatgggcaaactgataggaaacccgggatacttccacctttgattacagcaggaaattcaaattacacaagtgtattagtccgttctcatgctgctatgaagaaatactcgagactgggtaatttataagaaagaagtttaattgactcacagcatggctggggaggcctggggaaacttacaatcatggtggaaggggaaggaacacagccttcttcacctggaggcaggaaagagaagaatgagagccaagtgaagggggaagacccttataaaaccatcagatcttgtgaaaacttactcactatcatgagaatagcatgggggaaccacccctgtgattcaattacctcccaccaggtccctcccacgacaagtggagattatgggaactacaattgaagatgaggtttgtgtggggacacagtcaaaccatatcgacaagcctctgcctatgtgcaattccaatctaatcccaaccccacccactaaccaccacaaaaactccaagccattctcctttccttgctctctcaagcctcgctctccccagaaagcctccttatacaagtaataaacatttcataacttgtgtgtatgtagcattattgatctggacatcaaaactaaattgttggtgagggccaattctgcttctgtggggtggtaacaacatatggtatgtttgaatataagaggcacattcttgccccaggaccccaaggagtagaattcttcagtagaaataaagcaaaggaggtcatggtaggtagcagaaattctcccaaagtgttcgagtaggactagtgaaggtgtagtttattcagagtttatctaccctctctgccatgcactgttactatgaaattaacacatttttgctatggatgctgatgaccatcccctgagtctgaccagcttccttgcaggaaaaccaaagagaagcaaaatgtatctgtgctcttcattgcttccacacaaagcaggaaaaattcagccagaagtgcatagtttggatacgtatgctacaagcacagattattttgtcacaagagagagactttttcatgttgcctataagcttaggttacttttcccaaaacttcacacaaaatgattaataattattcattgcttggctgcaatgtttccatcctattggcagatttgatgagatgaacactgcagattctgaaatcaagcttatcagattaaaatcaaatttgccaactgagagggaaatgttcaccaatttgatgaatacgtggaatagaaaaattggtttgtctcatatatataggatactgcatttggtaaatagaaaacaaacatcctctaaagaaaaaaaaactttcaaaaagcatttcattttcgctttgaaatgctttaggagcaatgcattagaaagtatactaagagtacaccagaagttctttctcttttttctttttcatattttattattcttattttttctgcatctcagaagctgggcatgggacagctctgaaagatggaacttcagaaaattattcttgtctgttttgtagtttcacaagtcattctgtatccatttattcatttcctattagtgactaaatgaatgtctttaatgtctctttacagatgagagcccaggagataggtagacaagaactttatcactgatcaccaccaaccagtgattactgagcatcctccatggtcatgacaagatacagatgacgggaaacaagagtgggttaatccagagaatattacacttcctataaagctggaacttgtcttctggaatagagatgtttataagaacagagatagaaatatttaagtaattttttaaaactgaaaaattacagccagtagttactatgccttattcactccaccatctaacatagcacctagtatgcagtaggcacataataaatgcaaaagaaaataaacatgtgaatttgaatcattaaataattttgctggccatcaaaattattttatattaacacactgatcaattaaagatggagatagctaaatcattctattgttaaaattagtctgagcggcatgctctaaattactctaacagaaaaatgctcattaaaaataactataaacaacatctgtatacatctccctggatacctggataagagtttctctaggatatattctcagcagtggaggtactgtgtcaggggtattcttctctttaacttttctagatactgccaatttacgcaccaaaatcggtgtaccaatttaaacttccacaagccaaataaaaaggatatgtatcaagccatatctttgctaacatttgggctcattatgtttttcaaattttttttttttttgagacacagtcttgctctgtcacccaggctagagtgcagaggcctgatctcggctcactgcaacctccgcctcccaagttcaagcaattctcctgcctcagcctcccaagtagttgggattacaggtgcacaccaccaagtctggctaatttttgtacttctagtagagacggggtttcatcacgttggtcaggctggtcttgaactcctgaccttgtgatctgcctgcctcagcctcccaaagtgctgggattatagacgtgagccacctcgcccggccatgttttttcaaatttgtatagcatgatgggcacagttattgtagttttatttgcatatttttatttctagtgagatggagcatcttttaatattttattagtcactcaagtttactcttctgctctccataaattgtctcacaagtttttcctcatttttatactgaggtttttattatctttttcctattgatttgtaggcgttctttatgcatcctgaataccaaccctctgttggttatgcatactgaaaataaattcagtagattatcttttatatttcattaagatatttttgatacagtgtttattttaattgatgagcttttcattcacaatcacagcagtattgttcacaaaaatgaaaaaactgaaagcattctaataatatatcatgaggaaaatggaaaaataaatacatttggatatactcaaacaatgtaattttatgcaacagtgaattagagctatacatataagcacagataaatctcataaacaaaacattgaatgaaaaatgcaagttggagaagacaaaatgcaatattaacatacttaaaccttaaaaaacctttaaaatgatttaacgggccaggcagggtggctcacacctatgatcccagcactttgggaggctgaggtaggcagattgcttgagcccacgtgtttgagaccatcctgggaaacatggcaaaaccttgtctctacaaaaaaatacacaaaaaatacaaaaattagccaggtgtggtagcacacgcctccagtcccagctgcctgggagtctgatgtgggaggatcacctgagcccagggaggtcgaggctgcagtgagccatgattgtgccactctactccagcctgggtgacagagtgagaccttgtctctaaaaaataaaataaaataaaataatttaacttaaagtataaagaaacatgtgagaaaacaaacttcaaagtcaagtttatcatacagttctttgaatgtcttcatatttttgcatgttgaaataatagttattgaatgcagcagcagttctggtgtcactttctctagtgagctagatcaggcttcccctgcagccatgttgaagaaacttgcaactggcactgatccttcaccatccattcctaagagggtgtctttcaggatgaggagattgagatcattgccaatactcagccacattatgtcacctttacagacataacatgactgatcactgatactgcaactagtcaagttacaatgaactccgcaatatgattattggggcccagtgtatgcttgggcaatgatttgattactcaactctccagtaagacaggcagtctagggagagtacaaagaggagatttaaaatttctggcttaagctgggtgctgtggctcatgcctataatcccagcactttgggaaactgaggcaggaggatcactagaggtcaggagtttgggatcagcctagccaacatggtgaaaccctgcctctactaaaaatacaaaaattagcagagtgtggtggaacgcacctgtaatcccagatactagggaggctgaggcacaagaatcatttgaacctgggaggtggaggttgcagtgagctaagattgcaccactgc

SEQ ID NO: 14621 - DNA, 4185 bp, Rattus norvegicus
  ref <308>: DATABASE ACCESSION NUMBER: EMBL / U07683
  ref <309>: DATABASE ENTRY DATE: 2000-03-04
ctcgctccacagacaccgtcccgcggcagaggcgctttccaactcccgcgcagcagccgaaggacgcgctatgaagtcttatactccatatttcatgctcctgtggagtgctgttggaatagcaagggctgctaaaatcatcattgtgccgccaattatgtttgaaagccatttgtacattttcaagacactagcatcagccttgcacgagagaggccatcacactgtgttcctcctctcagaaggcagagacattgacccatctaatcactacagcctccagcgatacccagggatcttcaacagtaccacctcagatgctttcctgcagtctaaaatgcggaatattttctctggaagattgacagcagttgaactggttgacatactggatcactatactaagaattgtgacatgatggttggcaaccaagccctaatccagggtttgaaaaaagaaaagtttgacctgctactggttgaccccaatgatatgtgtggatttgtgatcgctcatcttttaggcgttaagtatgctgtgttttctactggcctttggtatcctgctgaagttggagcgcctgctcctttagcttatgtcccagagtttaactcactcctcacagaccgcatgaacttcctggaaaggatgaaaaatacaggcgtttacctcatatccagaatgggggttagctttctggttcttccgaaatatgaaaggataatgcagaagtacaacctgctccctgcaaagtccatgtatgatttggttcatgggtccagcttgtggatgttatgtactgacgtagcactggagtttccaaggcccaccctgcctaacgttgtatatgttggaggaatcctaacaaagccggccagcccactgccagaagatctgcagaggtgggtagatggtgctcaggagcatggctttgtcctggtatcttttggagctggtgtcaagtatctgtcagaagacattgctaacaaactggcaggagctctggggagattgcctcagaaagtgatttggaggttttctggaaccaaaccaaagaacctaggaaacaacactaagctcatagaatggttacctcaaaatgacctgcttggccattcaaacatcagagccttcctaagccatggtggtttgaacagtatatttgaaactatgtatcatggtgtccctgtagtaggaatcccactctttggagaccattatgatactatgactagagtacaggcgaaaggcatggggatcttgttagaatggaatacagttactgaaggggagctgtatgatgcactggtgaaagttatcaacaatcccagttatcggcagagggctcagaagttatcggaaattcataaggatcaacccggccaccctgtcaatcggactacctattggatagactacattcttcgccacgacggagcccatcacctccgttcggctgtccatcagatctccttctgtcagtattttctactggatattgcctttgtgcttctgcttggtgctgtcgcgctctacttcatagtgtcctatgtgacaaaatttatctatagaaaagtcaaaagtctgtgttctaggagtacgcacagcacagttaatggacactaccaaaatggaatcctcaatggcagatacaaaggaaatggtcatattaaacatgaaaaaaaggtaaaatgagccaacagcccaggcgacgggagcagatatgtccggtcattgagtttgtagtgctactctttagtctaacagctaccaaaactaaatgtcagcaaacaatcttaacaccctcatcagaccctgttaatgaaatccatggataaaatgtctgtacagagcacaaccccaagtgcaaaaatgtattttattctaacactgatgcagaaagaaggcagtgaaccatttagaagccttaattatttaaatcaattaagtgattgtgtcggacctgagttttaagtgttatgtatgtattacaggtgagggatggtgtttttctcttgataagatgcgtgtatgtttcccgtgtcgttgagttttagcttccatttgtatttagcttgtaacagtatttcaaagactgtttcctaaactcagtgtaacgaggcaagtgaaagatgggtggcacagtttttgtatttttgtttattatagacatttttatttttttcttttgtatatgcttttttcttaccaactatggatacttgcgaaggaaactcgtaatgaagtaactgagtaaaaaggttttcacatttttttctaatattttcctcctaccaataatttttctccagaagaattttctaattaggacaaagcaacaaagctcttacttttgttcaaagtactgaagagtacggctcaaacagcacttggaagcagagccatgtgcaaatgcttgtgtgacttggatatcccatcatttgagtttgaatattcaggtatcaacttctaaaattttagctttaaaataatcacctctcattccttttattatctgggtcacgatatagtacataggtgccaacatataattcctcttaagcagaacatttgcgtttctcctccttggtacctggtttgactgcaggagtttgaagtttgtcagcaaacaagacttcccatgcgacacagaaggtgacagaaattgtgccacccatttgtgcaatgagttcccgttccctcctcactccatcagcccaactcggtagcctttttggtcattgtgcttgacacgggacagtaagagtatctatttggaacagggagacgagtcacaacgttcataaattcaggacctccctgttgaaccacttactaaacggcaactgtaagcttattctacgtcactgtgtttactgagcatttgcactgcacatgcggagtgtgtgctttatttatttgtggttggaaatcccacccttgacacttgagagtagagaaatgaaatatttacttaacgtcactcaccaacctggcagagttgtgaaaaatctagaatgctgtaaatccttgtcatacactgtgacatacaactttgtgacactcccaccaggagccagtctcatgtacttagatatcaccagttttttaatgcacagtgcatacagcctactgctttctgaatacttgaaatggtatctgtacacaccagttagctactccttttcacaatcttatcacaatgttgccgttcaaagaggaaaaaagatcaggcaatgaatggtggggcagcagagcatagagtgtatgaacgagctgagtttacttttggcatttgataaagttggtaataggcactaactggatgattaaacataagttaatttccactgtgatttaaaaaaaacttaaaacaataaacaaagttgaaaatagaaaaatgttgttggaataaaatttttattcggattttattttacagtattatatataggtatatttacattataaacatgtttcttcttttaaaaaagaaaaagaaaagacacccatcatgagtagaactatgaaggaggaaaccaagaagatgttaatcacctaagtgggatatctgttcaaaaacaaaacaaaacaaaacaaaacaggtaaaggactgtagagatccgtgatagagtaagtgataaagacctttagctttcatgtgaaagaagtggatggtgagaaaagtgttctgtgttatcctctgtaaacatcaccagggtgtattagagaagatgacacaaaggggagaatattaggtgaatgctcaggaaagtctaatagcaaagacattagactagtggcaatggaaatcaagagaaactaaagatttgagaagattttaaaaatgtcaatttctgtgaaatctacttcagcatggccaacatagtgactttcaagacaggctgagctgtatagtgggaccctgtctaaaaatttcaaaagggaaaaatttaaaaaataagatatataaagagggctatctattaactagatggaatagttgggatctcttttcatccatgtgatacacacagcaaatgacaaatgttggtatggtagtcctataacattatcatggacttgaaaatttcttattttctcttattgtcagacattgtagtgttgtggtacaacttatgactcaagtttgagatgatgtttacataaagaaacatattccg

SEQ ID NO: 14622 - protein, 542 aa, Rattus norvegicus
  misc_feature (1)..(542): Xaa=Unknown amino acid
MKSYTPYFMLLWSAVGIARAAKIIIVPPIMFESHLYIFKTLASALHERGHHTVFLLSEGRDIDPSNHYSLQRYPGIFNSTTSDAFLQSKMRNIFSGRLTAVELVDILDHYTKNCDMMVGNQALIQGLKKEKFDLLLVDPNDMCGFVIAHLLGVKYAVFSTGLWYPAEVGAPAPLAYVPEFNSLLTDRMNFLERMKNTGVYLISRMGVSFLVLPKYERIMQKYNLLPAKSMYDLVHGSSLWMLCTDVALEFPRPTLPNVVYVGGILTKPASPLPEDLQRWVDGAQEHGFVLVSFGAGVKYLSEDIANKLAGALGRLPQKVIWRFSGTKPKNLGNNTKLIEWLPQNDLLGHSNIRAFLSHGGLNSIFETMYHGVPVVGIPLFGDHYDTMTRVQAKGMGILLEWNTVTEGELYDALVKVINNPSYRQRAQKLSEIHKDQPGHPVNRTTYWIDYILRHDGAHHLRSAVHQISFCQYFLLDIAFVLLLGAVALYFIVSYVTKFIYRKVKSLCSRSTHSTVNGHYQNGILNGRYKGNGHIKHEKKVKX

SEQ ID NO: 14623 - DNA, 2448 bp, Homo sapiens
  ref <308>: DATABASE ACCESSION NUMBER: EMBL / U30930
  ref <309>: DATABASE ENTRY DATE: 1999-07-01
gggttggttccaagtctttgctattgtgaatagtgccgcaataaacatacgtgtgcatgtgtctttatagcagcatgatttatagtcctttgggtatatacccagtaatgggatggctgggttctagatccctgaggaatcgccacattgacttgcacaatggttgaactagtttacagtcccaccaacagtgtaaaagtgttcctatttctccacatcctctccggcacctgttgtttcctgactttttaatgattgccattctaactggtgtgagatgatatctcattgtggttttgatttgcatttctctgatggccagtgatggtgagcattttttcatgtgttttttggctgcataaatgtcttcttttgagaagtgtctgttcatgatttttttttttagacaaagtattagatcagatatttttggggaaaaatgctttgtgattgcttgttttgaatggtgagcattgtattttgttttaagttgttttctggttgttattacagctatgaagtcttacactccatatttcattctcctgtggagtgctgttgggatagcgaaggctgccaaaatcatcatcgtgccgccaattatgtttgaaagccatatgtacattttcaagacgctagcctcagccttgcacgagagaggccaccatacagtgttcctcctctctgaaggcagagacatcgccccatctaatcattacagcctccagcgctacccagggatctttaacagtaccacctcagatgctttcctacagtccaagatgcggaatattttctctgggagattgacagcaatcgaactgtttgacatactggatcactatactaagaactgtgacctgatggttggcaaccatgccctgatccagggtctgaagaaagaaaaatttgacctgctgctggtggaccctaatgatatgtgtggatttgtgatagctcatcttttaggggttaaatatgctgtattttcaactggcctttggtatcctgctgaagtgggtgctcctgctccattagcatacgtcccagagtttaactcactcctcacagaccgcatgaacttgctgcaaaggatgaaaaataccggtgtttacctcatttccagattaggggtcagctttctggttcttcccaaatatgaaaggataatgcagaagtacaacctgctgccggagaagtccatgtatgatttggttcatgggtccagcctgtggatgctgtgtactgacgtagcactggaattcccaagacccactctgcctaatgttgtttatgtaggaggaatcctaaccaaaccagccagcccactaccagaagatctccaaagatgggtaaatggtgctaatgaacatggctttgtcttggtgtcttttggagctggtgtcaagtatctgtcagaagacattgctaacaaactggcaggagctctggggagattgcctcaaaaagtgatttggaggttttctggacccaaaccaaagaatctaggaaacaacactaaactcatagaatggttaccacaaaatgacctgcttgggcattcaaagattaaagccttcctgagccatggtggtttgaacagtatttttgaaactatgtatcatggtgtgcctgtagtgggaattccactctttggagaccattatgatactatgaccagagtacaggcaaaaggcatggggatattgctagaatggaagacagttactgaaaaagagctctatgaagcactagtgaaggttatcaataatcccagctaccgtcagagggctcagaagctttcggaaattcacaaggatcaacctggtcaccctgtcaatcgaactatctattggatagattatattattcgtcacaatggagcccatcacctacgtgccgctgtccatcagatctccttttgtcagtattttttactggatattgcctttgtgcttttgcttggtgctgccttgttatactttctcttgtcttgggtgacaaaatttatctacagaaaaatcaaaagtctgtggtctagaaataagcatagcacagttaatggacattaccacaatggaatcctcaatggcaagtacaaaagaaatggccatattaaacatgaaaagaaagtgaaatgagccaacagcccaggtgatagaaataaattggttcactcattgaatttttattgctattatttagtctaacagctactaaaagtaaaacatcagtaaacaattctaacatgcccttatgagactactaatgaaattctgtggaattaagatggctgtaaaaagcacaaacctaaaatgcagaaatgtattttattcaaatactgatgtagagagttttggcactgaaccttttagaagccttaattatttaaatcaattcagtgactgtgtcagaccttagttttaaatcttgatatgtgcgtgtccc

SEQ ID NO: 14624 - protein, 541 aa, Homo sapiens
  ref <308>: DATABASE ACCESSION NUMBER: SWISS-Prot / Q16880
  ref <309>: DATABASE ENTRY DATE: 2002-06-15
MKSYTPYFILLWSAVGIAKAAKIIIVPPIMFESHMYIFKTLASALHERGHHTVFLLSEGRDIAPSNHYSLQRYPGIFNSTTSDAFLQSKMRNIFSGRLTAIELFDILDHYTKNCDLMVGNHALIQGLKKEKFDLLLVDPNDMCGFVIAHLLGVKYAVFSTGLWYPAEVGAPAPLAYVPEFNSLLTDRMNLLQRMKNTGVYLISRLGVSFLVLPKYERIMQKYNLLPEKSMYDLVHGSSLWMLCTDVALEFPRPTLPNVVYVGGILTKPASPLPEDLQRWVNGANEHGFVLVSFGAGVKYLSEDIANKLAGALGRLPQKVIWRFSGPKPKNLGNNTKLIEWLPQNDLLGHSKIKAFLSHGGLNSIFETMYHGVPVVGIPLFGDHYDTMTRVQAKGMGILLEWKTVTEKELYEALVKVINNPSYRQRAQKLSEIHKDQPGHPVNRTIYWIDYIIRHNGAHHLRAAVHQISFCQYFLLDIAFVLLLGAALLYFLLSWVTKFIYRKIKSLWSRNKHSTVNGHYHNGILNGKYKRNGHIKHEKKVK

SEQ ID NO: 14625 - DNA, 4957 bp, Rattus norvegicus; identical to SEQ ID NO: 13624
  ref <308>: DATABASE ACCESSION NUMBER: EMBL / U08260
  ref <309>: DATABASE ENTRY DATE: 2000-03-04

SEQ ID NO: 14626 - protein, 1324 aa, Rattus norvegicus; identical to SEQ ID NO: 13625
  misc_feature (1)..(1324): Xaa=Unknown amino acid

SEQ ID NO: 14627 - DNA, 3995 bp, Homo sapiens; identical to SEQ ID NO: 13626
  ref <308>: DATABASE ACCESSION NUMBER: EMBL / L76224
  ref <309>: DATABASE ENTRY DATE: 1999-07-02

SEQ ID NO: 14628 - protein, 1233 aa, Homo sapiens [sequence omitted]

SEQ ID NO: 14629 - DNA, 581 bp, Rattus norvegicus
  ref <308>: DATABASE ACCESSION NUMBER: Refseq / NM_022854
  ref <309>: DATABASE ENTRY DATE: 2002-11-05
gaattccctcatctaaccgcaaagctgtgcacgatgattgaacccttcttggggacctggaaactggtctccagtgaaaacttcgagaattacgtgagggaactgggagtggaatgtgaaccccggaaagttgcatgtttaataaagccaagtgttagcattagtttcaatggggaaaggatggacatccaagcaggaagtgcatgcaggaacacggagatctccttcaaattgggggaagagtttgaagagaccactgcagacaaccggaaagtgaagagccttataacttttgaaggtgggtcaatgatccagatccaaagatggcttggcaaacagacaacaattaaaagaagaattgtggatggaagaatggtagtggagtgcaccatgaacaatgttgtcagcactaggacctacgaaagggtgtagcagatgggtagacgccagtaagaacttggccaccacagagaacttgctgctgaagaaactcagctccagggacagtgatttaaaatatcaccaacataagttttgctcaataaaagcactaattgaaagttaaaaaaaaaaaggaattc

SEQ ID NO: 14630 - protein, 132 aa, Rattus norvegicus
  ref <308>: DATABASE ACCESSION NUMBER: Refseq / NP_074045
  ref <309>: DATABASE ENTRY DATE: 2002-11-05
MIEPFLGTWKLVSSENFENYVRELGVECEPRKVACLIKPSVSISFNGERMDIQAGSACRNTEISFKLGEEFEETTADNRKVKSLITFEGGSMIQIQRWLGKQTTIKRRIVDGRMVVECTMNNVVSTRTYERV

SEQ ID NO: 14631 - DNA, 2150 bp, Homo sapiens
  ref <308>: DATABASE ACCESSION NUMBER: EMBL / X62167
  ref <309>: DATABASE ENTRY DATE: 1997-02-17
cgcttagaactgtgttgagctctcacccatcacgatgagcaacaaattcctgggcacctggaaacttgtctctagcgagaactttgacgattacatgaaagctctgggtgtggggttagccaccagaaaactgggaaatttggccaaacccactgtgatcatcagcaagaaaggagatattataactatacgaactgaaagtacctttaaaaatacagaaatctccttcaagctaggccaggaatttgaagaaaccacagctgacaatagaaagaccaagagcatcgtaaccctgcagagaggatcactgaatcaagtgcagagatgggatggcaaagagacaaccataaagagaaagctagtgaatgggaaaatggtagcggaatgtaaaatgaagggcgtggtgtgcaccagaatctatgagaaggtctgaaaaatcatttcttcattgaagtggctttttatcatttaatgatggaaatcaattgcttccattgacaaaactgaatacactgcaaatatttgtttttgcttttgtcttaatatatcagatatgcaaaggcctaaactgagaattaatctaaaagtcagtgttatttaaacattttcaatgtgcatgcatgtcattattacatcaaagcatatatattggccagacacaaacagttgatgatgtcattcaattaactacaaaattctaatctatgttgaactttgtatacttgaaatgataataaaaaggatataatttcttagtaaaatgaaatcaaagtattgatcagggtagcaaactcaaatgctgacaggggccagaggagatatggggaaggagcatcagaaatgaggcaagctaggagaatgggctattataatgtaaagaattgtagtctcagttaaaaggggtagcctctactccagccaacattttaaaattaatggataatttatagacagttaaatttatagacagttaagtaaaaatggataatttatagacagataatttatagacaggtaaatgtgagttaaatataactcacatcccactcaagacacaaaacattttcttaatcctagtacatttttttctgtcccttcccaatcagtgtccttttctgttccacccctaccaaaagcaagtagtggtttggtttctatcatatagattaattttacctgctcatatgaagggaattgtacatcatgcattcttttctgtttgccttttttaaattcagcatcatgtttttgtgatacatccacattgttgcatgcagctgtagtttgtttctttttattaccaagtactatttcattgtatgaatatatcacagtttatccattctactattaagacaattgagctatttctaattttcggctgctatgaataaagctgctacaaatatttttgtacaagactttttgtaaacataggagtccctttattttaaataaataactagtcatatcattaggtccagtaattgttgacaggcaggaacgggggaccattgcattgtgcccaagtaataataaaactatttcagatgtattatatgattgagcaaatgagaaaacatgttgatgttgatgggagtcaggatgttcactatggaaaaacaaatatacaaatatgaaatgagggaaggcaagaaagaaccatgtggaaatggaatagaattggtataaattcataatttctaaaccatgtatatgtacgtttatatgtattataattgcatacacatgcctccatgcatatatgtgtgtgataatacacatgcatttatgtgcgtgtgtgtatacacatgcatatatttactaatcctatctgccaaaatggcttagacacaaaaacacctcagcagaaatgaatatacctagcactcagatcttcgtgtctaatatagtttgccactaaaaggaaccaaggctacttggaaaaatggatgattccaaagcaagggcaaggtaggaacaagatgagcttgaaatatcttgttatgccagaaagtaatgttaaaaaaaaaaaatagaggtatattgccaaaacatagagccagcttgaaggggctcccactggccaaacttgagccaatctgagagcaaaataattgagaaaaataaataacaagataattgaaaaa

SEQ ID NO: 14632 - protein, 131 aa, Homo sapiens
  ref <308>: DATABASE ACCESSION NUMBER: SWISS-Prot / P02689
  ref <309>: DATABASE ENTRY DATE: 2002-06-15
SNKFLGTWKLVSSENFDDYMKALGVGLATRKLGNLAKPTVIISKKGDIITIRTESTFKNTEISFKLGQEFEETTADNRKTKSIVTLQRGSLNQVQRWDGKETTIKRKLVNGKMVAECKMKGVVCTRIYEKV

SEQ ID NO: 14633 - DNA, 4595 bp, Rattus norvegicus
  ref <308>: DATABASE ACCESSION NUMBER: EMBL / U10096
  ref <309>: DATABASE ENTRY DATE: 2000-03-04
cagaaggcggctgaatgggaggcagctttgggaatcattctgaagattacatgggagaccacatatcaacattacagcaggaatccagctatcgggtcgtctagatccaaaaccaagtgctcggtattgtaaccctacgattctctattttgaagcagaagtaggttaaaacaccaaccactgtaaaataggtagttcaaagtagattttggaagatgtcagtcaacatcccttccaactcagtgcccagtggtgccagtcgtttccaagtccatgttataaatgagggccatggcagtggtgcagccatgagtgacagcacggaccccccacattatgaagagacctctttcggggatgaagcccaaaacagactgaaaatcagctttaggcctgggaatcaggagtgctatgaaaattttctccaaactggagagactgctaaaacagacaccacgtttcacgcctatgactctcacacaaacacatattacctacaaacctttggccacaacaccatggacgccgtccccaagattgagtactaccgcaacaccggcagtgtgagcgggcccaaggtcaaccggccgagcctgcaggagatccacgagcagctagctaagaatgtggctgtggcccctggttcagctgacagggttgctaatggagatgggatgcctggagatgagcaagcagaaaacaaggaagaagacgtgactggtgttgtgaagtttggatgggtgaaaggtgtgctggtgaggtgcatgctgaacatctggggagtcatgctcttcattcgcctctcctggattgtaggagaagcgggaattggtctgggagtcatcatcattggcctgagcgtggtagtgacaacactcacaggtatctctatgtctgctatttgcacaaacggagtggtgagaggaggtggagcctactacctgatttcccggagcttagggcctgagttcggtgggtcaataggcttgatttttcgtttcgccaatgcagtgcgtgtcgctatgtatgtggtggggttcgcggagactgtggtagaccttcttaaggagagtgattcaatgatggtggatccaaccaatgacatccgaataatcggttccatcacggtggtgattcttctagggatctcagtagctgggatggagtgggaagctaaggctcaagtgattctcctggtcattctactcattggtatcgcaaacttcttcattggaactgtcatcccatccaacaacgagaagaaatccagaggcttcttcaactaccaagcatctatatttgcggaaaactttgggccaagcttcacagagggagaaggcttcttctcggtctttgctatctttttcccagctgctactgggattcttgctggtgccaacatctctggagacctggaggatccccaggacgccatccccagagggaccatgctggccattttcatcaccaccgtcgcctacataggtgttgctatttgcgtacgtgcctgtgtggtccgagacgccactgggagcatgaacgacactgtcgtttctgggatgaattgcaatgggtccgcagcctgcggactgggctacgacttctcaagatgtcagcatgagccatgccagtatgggttgatgaacaattttcaggtcatgagcatggtgtccgggttcggccccctcatcaccgcagggattttttcggcaacactgtcttcggccctagcctccctcgtcagtgcacccaaagtattccaggctctgtgcaaggacaacatcttcaaaggacttcagttcttcgcaaagggctatgggaaaaacaacgagcccctgagagggtacttcctcacttttgtgatagccatggcattcattctcatcgccgagctgaacgtcattgcacctatcatatccaacttcttcctggcctcatatgcgcttattaatttctcctgcttccatgcctcgtatgccaaatcgccaggatggaggccggcatatgggatttacaacatgtgggtatctctcttcggagccattttgtgctgtgcagtcatgtttgtcatcaactggtgggcggctgtcatcacctatgtcattgagctcttcctctatatctatgtgacttataagaagccagatgtgaactggggctcctccacacaggctctgtcctacgtgagcgctttagacaatgctctggaattaaccacagtggaagaccatgtgaaaaacttcagaccccagtgcattgtcttaacaggaggacccatgacaagacctgctctcctggacataacccatgcctttacgaagaatagtggcctctgtatctgctgcgaagtcttcgtgggacctcgcaagctgtgtgttaaagagatgaacagtggcatggctaaaaagcaggcctggctgatgaagaacaaaatcaaggctttttatgctgcggtggcggcagactgcttcagggacggtgtgcggagtctccttcaggcctcaggcctggggagaatgaagccaaacactctagtgattggatacaaaaagaactggaggaaagctcccttgtctgagcttgagaattacgtgggaatcatacatgacgcctttgactttgagattggtgtagtcatagtcagaatcagccaagggtttgacatctctccagttctccaggtacaagatgaactggagaaactggaacaggagagactggctctggaggccgcaatcaaagacaacgactgtgaggagggcaaggggggcatccgaggcttgtttaagaaggccggcaaactgaacattaccaagccggcccctaaaaaagacagcaacatcagcaccatccagtcgatgcacgtcggggagttcaatcagaagctggtagaagccagcgctcagtttaaaaagaaacagggaaaaggcacgatcgatgtttggtggttatttgatgatggagggttgacactgcttatcccatatatcttgactctcagaaagaaatggaaagactgtaagttaagaatctatgttggaggaaaaatcaaccgcattgaagaggaaaaaatttcaatggcttctcttctcagcaaatttaggataaaatttgcagacattcatataattggagacatcaacattaagccaaacaaagagagctggaaagtctttgaagagatgattgaaccttataggctccacgaaagccacaaagatttgaccactgctgagaaattaaaaagagaaagtccatggaaaattacagatgcagaactggaagcagtcaaggaaaagagttaccgccaagttcgactgaacgagctgttacaggagcattccagagccgccaacctcatcgtattgagccttccagtggcgagaaaaggatctatttcggatttgttgtacatggcgtggttagaaatcctgaccaagaacctccctcctgtgctactggttagaggaaatcacaagaatgtcctgacattttactcttaaagcgcgagggatgagaaatgttgtaccttggtgtccgaataattacaaaacgtgtctggtactttgtgttttaaaacctcatctatgaatatacaaacctctggagactatcccacctgattctacataaatttcatcttttttaaaaaagttattattaatgagagttttttcccaccagttttaaaaacatcgaaaacatttttcccttgtcgctggtgaataagaaattaataagagctggctgacatgcttgcaggatgtgctaatgtagatgagctccaggcaaacgcaatctcttgtttccgtggattcttctgcatggccccgtgcaggccacaggcccatagcgggctctctttaagttgttattgacagactggtgtggtgaaagcaggcggctatcatagggaaagacacactgggtcagtggcctgattctgcttggcctcctgagaagtttgtggagatttaaaaatcaatatccggaaactgtaagaaggactagagtctacaaagtgttcaaagcagttacctaaattaaggtttatttaatgcagccgataataagcttaacctctgatcacacgtagcttcgattcgctgctagccagaggtacactaggtaggtgagcaaagacacatgttccacttagacgaaatagagtcccaacatacaaatatcaattgtcttcctggttaaatgttttgaaatttctaccttaatactactttatcttttttctctgattaagtggtttgcatagacgaaataaaaatagacgatctcattgaaaaataatctcacaggtttccaatccactactaaaaatatatccagatcctacatttatttacttctctatatacaggtatatgggttttatagaataacaaggatataagtggagaacttgtaaaaatttttaaaaaccacaggtgttgatttttcttcttgttcgtgtgtgtataatatttaatcacagaaaaaatgcttatatgataaatggcttggttttggttttgttggcatattttgactgttctggggaagcttgtggggggcaaatcaacctgaaataaaattctact

SEQ ID NO: 14634 - protein, 1095 aa, Rattus norvegicus
  ref <308>: DATABASE ACCESSION NUMBER: SWISS-Prot / P55016
  ref <309>: DATABASE ENTRY DATE: 1997-11-01
MSVNIPSNSVPSGASRFQVHVINEGHGSGAAMSDSTDPPHYEETSFGDEAQNRLKISFRPGNQECYENFLQTGETAKTDTTFHAYDSHTNTYYLQTFGHNTMDAVPKIEYYRNTGSVSGPKVNRPSLQEIHEQLAKNVAVAPGSADRVANGDGMPGDEQAENKEEDVTGVVKFGWVKGVLVRCMLNIWGVMLFIRLSWIVGEAGIGLGVIIIGLSVVVTTLTGISMSAICTNGVVRGGGAYYLISRSLGPEFGGSIGLIFRFANAVRVAMYVVGFAETVVDLLKESDSMMVDPTNDIRIIGSITVVILLGISVAGMEWEAKAQVILLVILLIGIANFFIGTVIPSNNEKKSRGFFNYQASIFAENFGPSFTEGEGFFSVFAIFFPAATGILAGANISGDLEDPQDAIPRGTMLAIFITTVAYIGVAICVRACVVRDATGSMNDTVVSGMNCNGSAACGLGYDFSRCQHEPCQYGLMNNFQVMSMVSGFGPLITAGIFSATLSSALASLVSAPKVFQALCKDNIFKGLQFFAKGYGKNNEPLRGYFLTFVIAMAFILIAELNVIAPIISNFFLASYALINFSCFHASYAKSPGWRPAYGIYNMWVSLFGAILCCAVMFVINWWAAVITYVIELFLYIYVTYKKPDVNWGSSTQALSYVSALDNALELTTVEDHVKNFRPQCIVLTGGPMTRPALLDITHAFTKNSGLCICCEVFVGPRKLCVKEMNSGMAKKQAWLMKNKIKAFYAAVAADCFRDGVRSLLQASGLGRMKPNTLVIGYKKNWRKAPLSELENYVGIIHDAFDFEIGVVIVRISQGFDISPVLQVQDELEKLEQERLALEAAIKDNDCEEGKGGIRGLFKKAGKLNITKPAPKKDSNISTIQSMHVGEFNQKLVEASAQFKKKQGKGTIDVWWLFDDGGLTLLIPYILTLRKKWKDCKLRIYVGGKINRIEEEKISMASLLSKFRIKFADIHIIGDINIKPNKESWKVFEEMIEPYRLHESHKDLTTAEKLKRESPWKITDAELEAVKEKSYRQVRLNELLQEHSRAANLIVLSLPVARKGSISDLLYMAWLEILTKNLPPVLLVRGNHKNVLTFYS

SEQ ID NO: 14635 - DNA, 3362 bp, Homo sapiens
  ref <308>: DATABASE ACCESSION NUMBER: EMBL / U58130
  ref <309>: DATABASE ENTRY DATE: 2000-03-04
aaaaaatcaattttggaagatgtcactgaacaactcttccaatgtatttctggattcagtgcccagtaataccaatcgctttcaagttagtgtcataaatgagaaccatgagagcagtgcagctgcagatgacaatactgacccaccacattatgaagaaacctcttttggggatgaagctcagaaaagactcagaatcagctttaggcctgggaatcaggagtgctatgacaatttcctccacagtggagaaactgctaaaacagatgccagttttcacgcttatgattctcacacaaacacatactatctacaaacttttggccacaacaccatggatgccgttcccaagatagagtactatcgtaacaccggcagcatcagtgggcccaaggtcaaccgacccagcctgcttgagattcacgagcaactcgcaaagaatgtggcagtcaccccaagttcagctgacagagttgctaacggtgatgggatacctggagatgaacaagctgaaaataaggaagatgatcaagctggtgttgtgaagtttggatgggtgaaaggtgtgctggtaagatgcatgctgaacatctggggagtcatgctcttcattcgcctctcctggattgttggagaagctggaattggtcttggagttatcatcattggcctatccaccatagtaacgacaatcacaggtatgtccacgtctgctattgccacgaacggagttgttagaggaggtggggcctactatcttatttccagaagtttagggcccgagttcggtgggtcaataggcctgatctttgcttttgctaatgcagtggctgttgctatgtatgtggtgggattcgctgaaactgtagtagatctacttaaggagagtgattcgatgatggtggatccaaccaatgacatccggattataggctccatcacagtggtgattcttctaggaatttcagtagctggaatggaatgggaggcaaaggcccaagtcattcttctggtcattcttctaattgctattgcaaacttcttcattggaactgtcattccatccaacaatgagaaaaagtccagaggtttctttaattaccaagcatcaatatttgcagaaaactttgggccacgcttcacaaagggtgaaggcttcttctctgtctttgccatttttttcccagcagctactgggattcttgctggtgccaatatctcaggagatttggaggatccccaagatgccatccccagaggaaccatgctggccattttcatcaccactgttgcctacttaggggttgcaatttgtgtaggggcctgtgtggtccgagatgccaccgggaacatgaatgacaccatcatttctgggatgaactgcaatggttcagcagcatgtgggttgggctatgacttctcaagatgtcgacatgaaccatgtcagtacgggctgatgaacaatttccaggtcatgagcatggtatcagggttcggccccctcatcactgcgggaatcttttctgcaacactctcctccgccctggcctcccttgtcagcgcacccaaagtgttccaggctctgtgcaaggacaacatctacaaagccctgcagttttttgcaaagggatatgggaaaaacaatgaacccctgagaggatatattctcacttttcttatagccatggcatttattcttattgcggaactgaacaccattgctcccatcatctccaactttttcctggcctcatatgcacttattaatttctcctgcttccatgcctcttatgccaaatctccaggatggagacctgcgtatggaatttacaacatgtgggtatctctttttggagctgttttgtgctgtgcagtcatgtttgtcatcaactggtgggcagctgtcatcacctatgtcattgaattcttcctttacgtctatgtgacttgtaagaagccagatgtgaactggggctcctccacacaggctctttcctacgtgagtgctttagacaatgctctggaattaaccacagtggaagaccacgtaaaaaacttcaggccccagtgcattgtcttaacagggggacccatgacaagacctgctctcctggacataactcacgcctttaccaagaacagtggcctttgcatctgctgtgaagtctttgtgggaccgcgcaaactgtgtgttaaggagatgaacagtggcatggcgaaaaaacaggcctggcttataaagaacaaaatcaaggctttttatgctgcagtggcggcagactgtttcagggatggtgtccgaagtcttcttcaggcctcaggcttaggaagaatgaaaccaaacactctggtgattggatataagaaaaactggaggaaagctcccttgacagagattgagaactacgtgggaatcatacatgatgcatttgattttgagattggcgtggttatagtcagaatcagccaaggatttgacatctctcaggttcttcaggtgcaagaggaattagagagattagaacaggagagactagcattggaagcgactatcaaagataatgagtgtgaagaggaaagtggaggcatccgaggcttgtttaaaaaagctggcaagttgaacattactaagacaacgcctaaaaaagatggcagcattaacacaagccagtcgatgcatgtgggagagttcaaccagaaactggtggaagccagcactcaatttaaaaagaaacaagaaaaaggcacaattgatgtttggtggttgtttgatgatggagggttaacacttcttatcccctatatcttaactctcagaaaaaaatggaaagactgtaaattaagaatctatgtgggagggaagatcaaccgcattgaagaagaaaaaattgcaatggcttcccttctgagcaaatttaggataaaatttgcagacatccatatcatcggtgacatcaacattaggccaaacaaagagagctggaaagtctttgaagagatgattgaaccatatcgtctccatgaaagctgcaaagatttaacaactgctgagaaattaaaaagagaaactccgtggaaaattacagatgcagaactggaagcagtcaaggaaaagagttaccgccaagttcgactgaatgaactcttacaggagcactccagagctgctaatctcattgtcctgagccttcccgtggcaagaaagggatccatatcggatttgttgtatatggcttggttggaaatcctcacaaagaacctcccacctgtcttactagttagaggaaatcacaaaaatgtcttgacattttactcttaaaacatgaaagattggaatacattttaacttaatgtaatgcata

SEQ ID NO: 14636 - protein, 1099 aa, Homo sapiens; identical to SEQ ID NO: 885
  ref <308>: DATABASE ACCESSION NUMBER: SWISS-Prot / Q13621
  ref <309>: DATABASE ENTRY DATE: 2001-10-16

SEQ ID NO: 14637 - DNA, 2754 bp, Rattus norvegicus
  ref <308>: DATABASE ACCESSION NUMBER: EMBL / U10699
  ref <309>: DATABASE ENTRY DATE: 2000-03-04
ccccctcgagcacagccaacagtcaccaaagtcagccactggctgtcccggggcgcagacgccaaggccactcaggccagggcagggaccctggccggcctagccagtgctcagtcccatggccccggccggccactgagccccaccatgggcggtttatactcagagtacctcaatcctgagaaggttcaggaacactacaattacaccaaggagacgctggacatgcaggagacgccctcccgcaaggtggcctccgccttcatcatcattttatgctgtgccatcgtggtggagaaccttctggtgctaatcgcagtggccaggaacagcaagttccactcagccatgtacctgttcctcggcaacctggcagcctccgacctgctggcaggcgtggccttcgtggccaacaccttgctctccggacctgtcaccctgtccttaactcccttgcagtggtttgcccgagagggttcagccttcatcacgctctctgcctcggtcttcagcctcctggccattgccatcgagagacaagtggccatcgccaaggtcaagctctacggcagtgacaaaagctgtcgaatgttgatgctcattggggcctcttggctgatatcgctgattctgggtggcttgcccatcctgggctggaattgtctggaccatctggaggcttgctccactgtgctgcccctctatgctaagcactatgtgctctgcgtggtcaccatcttctctgtcatcttactggctatcgtggccttgtacgtccgaatctacttcgtagtccgctcaagccatgcggacgttgctggtcctcagacgctggccctgctcaagacagtcaccatcgtactgggtgttttcatcatctgctggctgccggcttttagcatccttctcttagactctacctgtcccgtccgggcctgtcctgtcctctacaaagcccattatttctttgccttcgccaccctcaactctctgctcaaccctgtcatctatacatggcgtagccgggaccttcggagggaggtactgaggcccctgctgtgctggcggcaggggaagggagcaacagggcgcagaggtgggaaccctggtcaccgactcctgcccctccgcagctccagctccctggagagaggcttgcatatgcctacatcgccaacatttctggagggcaacacagtggtctgaggggaaatgtgaactgatctgtaaccaagccacagagagagctctgtggggagagaccaggtgacctcatcatgtccctcagtgccacaggtctggaggaactgaccacggctcataggtcaggtggccaacggaggcactgactaatcagattgtagtactgtgactgtggggaccattaagggtctagggggacagcaggctcgagtttagggctagacatttgccacttggtacatagggtgtcggcatcctgtctgtcctatcttccagcttcccggttcccttcctgcctcctccttttaagggcctctctacatagccccggctggctagagcttgctgtgcagaccaggctgacctggacctcccagagatagatcaactaactgtgtcctgagtgctgggattttaaagccgtgtgcccccacacccggctcctgccaccttccagaagcaatcttaggccacttgttgaggaaacactctccccagaggacccaagccttcttccctgtctctctgaggcctgaatccacagcttccccattttatcaactgctgcttcttccctttccttctgtgttcaggggaaaccactgtgggggcagggaggggtcctgggatcccagtttttatgctcagatctcactgagcacttgctttattggggagcagagaggaatcagctgaggcagtgtggggcagatgttgaggagaatttgggcttcctggtgagaaaactctaggggaggcgttggttattcctggaacccagcctctctccccacgaactcttcacacccgcagccttgagctggatgcaaaggctgctttcaatttgtctttgtagttttgttttgttttgttttgtttttttaaattgggacaggatctcacgtaccccaggctggcctccgactcactatgtagccaaggctggctttggacttctgaccctcctgcctccgcttctggagtgcaggtattacaagggtgtaccaccaccaccaccaccaccaacaacaacaacaacaacaacacctgtcttgaaaactatcatgaatgacatggttcacatagccttgggtggccaaggacatcccggatactcttatggcatcttccttgaaggactttgctaaatcctgtggagaagtagaaaatccaatacggtacaaacggtatttatgtgtgtctgtgtatcagtgtggggtctgtgacctcctatcccagtgtgggtgctgtctgacctcttatgtgcacatccgtgtcaagactgctagagagatggacgggggtgtgtgtgcttgtgggggtctagccatgatcaggcctcctgggaattgctgaatcatctctcccacacacagacacacacctccgccttaaagaaatgtgtgaaagaaaaggctgaggaaggggagatttgggaggcaaggagccagtcgggagtgtgtctcccctcatacagcttcccagatgtcccccttgtgctggaaacccagaactgggccaataaacagttcaatttctcttgaaaaaaaa

SEQ ID NO: 14638 - protein, 353 aa, Rattus norvegicus
  misc_feature (1)..(353): Xaa=Unknown amino acid
MGGLYSEYLNPEKVQEHYNYTKETLDMQETPSRKVASAFIIILCCAIVVENLLVLIAVARNSKFHSAMYLFLGNLAASDLLAGVAFVANTLLSGPVTLSLTPLQWFAREGSAFITLSASVFSLLAIAIERQVAIAKVKLYGSDKSCRMLMLIGASWLISLILGGLPILGWNCLDHLEACSTVLPLYAKHYVLCVVTIFSVILLAIVALYVRIYFVVRSSHADVAGPQTLALLKTVTIVLGVFIICWLPAFSILLLDSTCPVRACPVLYKAHYFFAFATLNSLLNPVIYTWRSRDLRREVLRPLLCWRQGKGATGRRGGNPGHRLLPLRSSSSLERGLHMPTSPTFLEGNTVVX

SEQ ID NO: 14639 - DNA, 2757 bp, Homo sapiens
  ref <308>: DATABASE ACCESSION NUMBER: EMBL / M31210
  ref <309>: DATABASE ENTRY DATE: 2000-03-04
tctaaaggtcgggggcagcagcaagatgcgaagcgagccgtacagatcccgggctctccgaacgcaacttcgccctgcttgagcgaggctgcggtttccgaggccctctccagccaaggaaaagctacacaaaaagcctggatcactcatcgaaccacccctgaagccagtgaaggctctctcgcctcgccctctagcgttcgtctggagtagcgccaccccggcttcctggggacacagggttggcaccatggggcccaccagcgtcccgctggtcaaggcccaccgcagctcggtctctgactacgtcaactatgatatcatcgtccggcattacaactacacgggaaagctgaatatcagcgcggacaaggagaacagcattaaactgacctcggtggtgttcattctcatctgctgctttatcatcctggagaacatctttgtcttgctgaccatttggaaaaccaagaaattccaccgacccatgtactattttattggcaatctggccctctcagacctgttggcaggagtagcctacacagctaacctgctcttgtctggggccaccacctacaagctcactcccgcccagtggtttctgcgggaagggagtatgtttgtggccctgtcagcctccgtgttcagtctcctcgccatcgccattgagcgctatatcacaatgctgaaaatgaaactccacaacgggagcaataacttccgcctcttcctgctaatcagcgcctgctgggtcatctccctcatcctgggtggcctgcctatcatgggctggaactgcatcagtgcgctgtccagctgctccaccgtgctgccgctctaccacaagcactatatcctcttctgcaccacggtcttcactctgcttctgctctccatcgtcattctgtactgcagaatctactccttggtcaggactcggagccgccgcctgacgttccgcaagaacatttccaaggccagccgcagctctgagaatgtggcgctgctcaagaccgtaattatcgtcctgagcgtcttcatcgcctgctgggcaccgctcttcatcctgctcctgctggatgtgggctgcaaggtgaagacctgtgacatcctcttcagagcggagtacttcctggtgttagctgtgctcaactccggcaccaaccccatcatttacactctgaccaacaaggagatgcgtcgggccttcatccggatcatgtcctgctgcaagtgcccgagcggagactctgctggcaaattcaagcgacccatcatcgccggcatggaattcagccgcagcaaatcggacaattcctcccacccccagaaagacgaaggggacaacccagagaccattatgtcttctggaaacgtcaactcttcttcctagaactggaagctgtccacccaccggaagcgctctttacttggtcgctggccaccccagtgtttggaaaaaaatctctgggcttcgactgctgccagggaggagctgctgcaagccagagggaggaagggggagaatacgaacagcctggtggtgtcgggtgttggtgggtagagttagttcctgtgaacaatgcactgggaagggtggagatcaggtcccggcctggaatatatattctacccccctggagctttgattttgcactgagccaaaggtctagcattgtcaagctcctaaagggttcatttggcccctcctcaaagactaatgtccccatgtgaaagcgtctctttgtctggagctttgaggagatgttttccttcactttagtttcaaacccaagtgagtgtgtgcacttctgcttctttagggatgccctgtacatcccacaccccaccctcccttcccttcatacccctcctcaacgttcttttactttatactttaactacctgagagttatcagagctggggttgtggaatgatcgatcatctatagcaaataggctatgttgagtacgtaggctgtgggaagatgaagatggtttggaggtgtaaaacaatgtccttcgctgaggccaaagtttccatgtaagcgggatccgttttttggaatttggttgaagtcactttgatttctttaaaaaacatcttttcaatgaaatgtgttaccatttcatatccattgaagccgaaatctgcataaggaagcccactttatctaaatgatattagccaggatccttggtgtcctaggagaaacagacaagcaaaacaaagtgaaaaccgaatggattaacttttgcaaaccaagggagatttcttagcaaatgagtctaacaaatatgacatccgtctttcccacttttgttgatgtttatttcagaatcttgtgtgattcatttcaagcaacaacatgttgtattttgttgtgttaaaagtacttttcttgatttttgaatgtatttgtttcaggaagaagtcattttatggatttttctaacccgtgttaacttttctagaatccaccctcttgtgcccttaagcattactttaactggtagggaacgccagaacttttaagtccagctattcattagatagtaattgaagatatgtataaatattacaaagaataaaaatatattactgtctctttagtatggttttcagtgcaattaaaccgagagatgtcttgtttttttaaaaagaatagtatttaataggtttctgacttttgtggatcattttgcacatagctttatcaacttttaaacattaataaactgatttttttaaag

SEQ ID NO: 14640 - protein, 381 aa, Homo sapiens
  ref <308>: DATABASE ACCESSION NUMBER: SWISS-Prot / P21453
  ref <309>: DATABASE ENTRY DATE: 2001-10-16
MGPTSVPLVKAHRSSVSDYVNYDIIVRHYNYTGKLNISADKENSIKLTSVVFILICCFIILENIFVLLTIWKTKKFHRPMYYFIGNLALSDLLAGVAYTANLLLSGATTYKLTPAQWFLREGSMFVALSASVFSLLAIAIERYITMLKMKLHNGSNNFRLFLLISACWVISLILGGLPIMGWNCISALSSCSTVLPLYHKHYILFCTTVFTLLLLSIVILYCRIYSLVRTRSRRLTFRKNISKASRSSENVALLKTVIIVLSVFIACWAPLFILLLLDVGCKVKTCDILFRAEYFLVLAVLNSGTNPIIYTLTNKEMRRAFIRIMSCCKCPSGDSAGKFKRPIIAGMEFSRSKSDNSSHPQKDEGDNPETIMSSGNVNSSS

SEQ ID NO: 14641 - DNA, 2772 bp, Rattus norvegicus; identical to SEQ ID NO: 13677
  ref <308>: DATABASE ACCESSION NUMBER: EMBL / U30381
  ref <309>: DATABASE ENTRY DATE: 2000-03-04

SEQ ID NO: 14642 - protein, 794 aa, Rattus norvegicus; identical to SEQ ID NO: 13678
  ref <308>: DATABASE ACCESSION NUMBER: SWISS-Prot / Q62806
  ref <309>: DATABASE ENTRY DATE: 2001-10-16

SEQ ID NO: 14643 - DNA, 2858 bp, Homo sapiens; identical to SEQ ID NO: 13679
  ref <308>: DATABASE ACCESSION NUMBER: EMBL / AF039019
  ref <309>: DATABASE ENTRY DATE: 2001-06-09

SEQ ID NO: 14644 - protein, 794 aa, Homo sapiens; identical to SEQ ID NO: 13680
  ref <308>: DATABASE ACCESSION NUMBER: SWISS-Prot / Q9UQR1
  ref <309>: DATABASE ENTRY DATE: 2001-10-16

SEQ ID NO: 14645 - DNA, 2118 bp, Rattus norvegicus
  ref <308>: DATABASE ACCESSION NUMBER: EMBL / U39206
  ref <309>: DATABASE ENTRY DATE: 2000-03-04
tgagagaaggtggctgcttaagaccacccatactaagttagacagagcactgaacctggttgcttatttctccataaccaactctctgaagccaaacagccagagtgatcctgttggcttcagacaggggggtttccaggatgccacagttggacctgtcctggctgggactgaggctggagacatccttaccatggctgcttttgctgctgatcggagcttcctggctcttggtccgtgtcttgactcagacctatatcttctacagaacatatcaacatctttgtgatttccctcaaccacccaaatggaattggttcttgggtcacctgggcatgatcactcccactgagcaaggtctgaagcaggtaactaagctcgtggccacctacccccagggcttcatgacatggctgggtcctatcctccctatcatcactctgtgccaccctgacgtcattcgatctgttctcagtgcctcagcttcggttgccctaaaggaagtaatcttctacagctttctgaaaccctggttgggggatggactcctgttgagcgatggtgacaagtggagctgccaccgccgcatgctgacacctgccttccacttcaacatcctgaaaccctatgtgaagattttcaacgacagcaccaacatcatgcacgccaaatggcaggacctggcctcaggaggcagcgcccgtctggacatgtttaagaacatcagcctgatgaccttggacagtctgcagaaatgtgtcttcagttttgatagcaactgccaggagaagcccagtgagtatatttctgccatcttggagctcagtgccctagtggccaaacggtaccagcagctgcttctacacacagactcactctatcagctcacccataatggtcggcgcttccataaggcctgcaaattggtacacaacttcacagacgctgtcatccagggtcgacgacgcgctctccccagtcagcatgaggatgatatcctcaaggccaaggccaggtccaaaactctggatttcattgatgtgctgctgctgaccaaggatgaagatggaaaggagctgtcagatgaagacattagagctgaggctgacaccttcatgtttgaaggccatgacaccacagccagtgggctctcctggatcctgtacaaccttgcaaggcacccggaataccaggagcgctgccggcaggaggtgcgggagctgctgagggaccgagagtctacagagattgaatgggacgacctggcccagctgcccttcctgaccatgtgcatcaaggagagtctgcgactgcatcccccagtcacggtcatctcccgtcgttgtacccaagacatcgtgctcccagatggccgggtcatccctaaaggtgtcatctgcatcatcaatattttcgcgacccatcacaacccaactgtgtggcccgaccctgaggtctatgatcccttccgcttcgacccagagaatatcaaggacaggtcacctctggcttttattcccttctccgctgggcccaggaactgcataggacagacttttgccatgaacgagatgaaggtggcactggcgctgacgctgctgcgcttccgcgtcctgccggatgacaaggagccgcgccggaagccagagctgatcctgcgtgcggagggcggactgtggctgcgggtggagccactgagcacacagtgactacgtacatctggacgggtcccacccacccacatacctttgtagatgtcacctgtgcctgaggctccttgaataccagtagggggctctggaggacaacagggaaccagcagttgtggcagggagggagatggggttggtgcccaaattcctgacttcatctggccgttcgtgggcctctacactgtcctttagcctagttggacttactctcttgggcgacagagagctaaggtaagtgtctaagcaggctcgagctcacagaatcttttaaattgaggtacatttcctgccttgacctccattctaatctcaaaactctcatcctgggattctgaagtgtttctgtgaaaactaaaattttaggtttattaaacctaacaagtctgccaaaaaaaaaaaaaaaaaa

SEQ ID NO: 14646 - protein, 522 aa, Rattus norvegicus
  ref <308>: DATABASE ACCESSION NUMBER: SWISS-Prot / P51869
  ref <309>: DATABASE ENTRY DATE: 2002-06-15
MPQLDLSWLGLRLETSLPWLLLLLIGASWLLVRVLTQTYIFYRTYQHLCDFPQPPKWNWFLGHLGMITPTEQGLKQVTKLVATYPQGFMTWLGPILPIITLCHPDVIRSVLSASASVALKEVIFYSFLKPWLGDGLLLSDGDKWSCHRRMLTPAFHFNILKPYVKIFNDSTNIMHAKWQDLASGGSARLDMFKNISLMTLDSLQKCVFSFDSNCQEKPSEYISAILELSALVAKRYQQLLLHTDSLYQLTHNGRRFHKACKLVHNFTDAVIQGRRRALPSQHEDDILKAKARSKTLDFIDVLLLTKDEDGKELSDEDIRAEADTFMFEGHDTTASGLSWILYNLARHPEYQERCRQEVRELLRDRESTEIEWDDLAQLPFLTMCIKESLRLHPPVTVISRRCTQDIVLPDGRVIPKGVICIINIFATHHNPTVWPDPEVYDPFRFDPENIKDRSPLAFIPFSAGPRNCIGQTFAMNEMKVALALTLLRFRVLPDDKEPRRKPELILRAEGGLWLRVEPLSTQ

SEQ ID NO: 14647 - DNA, 1980 bp, Homo sapiens
  ref <308>: DATABASE ACCESSION NUMBER: EMBL / AF054821
  ref <309>: DATABASE ENTRY DATE: 1998-04-06
accctcactcaccacccatctgccctgcaggatgccacagctgagcctgtcctcgctgggcctttggccaatggcagcatccccgtggctgctcctgctgctggttggggcctcctggctcctggcccgcatcctggcctggacctataccttctatgacaactgctgccgcctccggtgtttcccgcaacccccgaaacggaattggttcttgggtcacctgggcctggtcacccccacggagcagggcatgagggtcctgactcagctggtggccacctacccccagggctttaaggtctggatgggccccatcttccccgtcatccgtttttgccaccccaacatcatccggtctgtcatcaacgcctcagctgccattgtaccaaaggacaaggtcttctacagcttcctgaagccctggctgggggatgggctcctgctgagtgctggtgaaaagtggagccgccaccgtcggatgctgacgcctgccttccatttcaacatcctgaagccctatatgaagattttcaatgagagtgtgaacatcatgcatgccaagtggcaactcctggcctcaaaagggtatgcccgtctggacatgtttgagcacatcagcctcatgaccttggacagtctgcagaaatgtgtcttcagctttgacagccattgccaggagaagcccagtgaatatattgccgccatcttggagctcagtgcccttgtgacaaaaagacaccagcagatcctcctgtacatagacttcctgtattatctcacccctgatgggcagcgtttccgcagggcctgccgcctggtgcacgacttcacagatgccgtcatccaggagcggcgccgcaccctccctagccagggtgttgatgacttcctccaagccaaggccaaatccaagactttggacttcattgatgtactcctgctgagcaaggatgaagatgggaagaagttgtccgatgaggacataagagcagaagctgacacctttatgtttgagggccatgacaccacagccagtggtctctcttgggtcctgtaccaccttgcaaagcacccagaataccaggagcgctgtcggcaggaggtgcaagagcttctgaaggaccgtgagcctaaagagattgaatgggacgacctggcccagctgcccttcctgaccatgtgcattaaggagagcctgaggctgcatcccccagtccctgccgtctctcgctgctgcacccaagacattgtgctcccagacggccgggtcatccccaaaggcattatctgcctcatcagtgtttttggaacccatcacaacccggccgtgtggccggaccctgaggtctatgacccctttcgctttgacccaaagaacatcaaggagaggtcacctctggcttttattcccttctcagcagggcccaggaactgcatcgggcaggcgttcgcgatggcggagatgaaggtggtcctggggctcacgctgctgcgcttccgcgtcctgcctgaccacaccgagccccgcaggaagccggagctggtcctgcgcgcagagggcggaatttggctgcgggtggagcccctgagctgagttctgcagagacccactctgaccccactaaaatgacccctgattcatcaaaagtgaggcctagaattaccctaagaccctgttccacagtcctgtattctatcctagatatctactcaaaataattgagacaagtgttcaaacagaaagacgcttgtgcgtgaatgttcatggcagccctattcacagtagccaaacgatgaaaacaaccccaagctatatattaccagatgaaaggataaacaaaatatggtccatccatacaatggagtattacacagccataaaaaggaatgaagcagtgatccccactacactgtggatgaaccttgaatgcatgatactgaatgaaagacatcagatgcaaaaggtcacatagtgtactg

SEQ ID NO: 14648 - protein, 521 aa, Homo sapiens
  misc_feature (1)..(521): Xaa=Unknown amino acid
MPQLSLSSLGLWPMAASPWLLLLLVGASWLLARILAWTYTFYDNCCRLRCFPQPPKRNWFLGHLGLVTPTEQGMRVLTQLVATYPQGFKVWMGPIFPVIRFCHPNIIRSVINASAAIVPKDKVFYSFLKPWLGDGLLLSAGEKWSRHRRMLTPAFHFNILKPYMKIFNESVNIMHAKWQLLASKGYARLDMFEHISLMTLDSLQKCVFSFDSHCQEKPSEYIAAILELSALVTKRHQQILLYIDFLYYLTPDGQRFRRACRLVHDFTDAVIQERRRTLPSQGVDDFLQAKAKSKTLDFIDVLLLSKDEDGKKLSDEDIRAEADTFMFEGHDTTASGLSWVLYHLAKHPEYQERCRQEVQELLKDREPKEIEWDDLAQLPFLTMCIKESLRLHPPVPAVSRCCTQDIVLPDGRVIPKGIICLISVFGTHHNPAVWPDPEVYDPFRFDPKNIKERSPLAFIPFSAGPRNCIGQAFAMAEMKVVLGLTLLRFRVLPDHTEPRRKPELVLRAEGGIWLRVEPLSX

SEQ ID NO: 14649 - DNA, 880 bp, Rattus norvegicus
  ref <308>: DATABASE ACCESSION NUMBER: EMBL / U57062
  ref <309>: DATABASE ENTRY DATE: 2002-10-02
cctgggaggatgccaccagtcctgatactcctgaccctacttctgcctcttggagccagagcagaggagatcatcggaggcaatgaggtcagtccgcattcccgcccctacatggcatattttgagtttctcaatgataacgggaagaagacgttctgcggaggcttcctggtgagagacaacttcgtgctgacggctgctcactgcagaggaagatcaatgacagtcacactgggggcccacaacatcaaggctaaagagaagacacagcagattatccctgtggcaaacgccactccccaccctgcctataatcctgataaacgttccaatgacatcatgctattaaagctggtgagaagtgccaagaggactagcgctgtgaggcctctcaacctgcccaggcgcaatgcccatgtgaagccaggagatgtgtgctacatggctggctggggaaagataaccccacagggggaattccccaacacactgcgggaggttgagctgacagtacagaaggatcgggtctgtgagtcccagttccaacgttcttacatcaaagcgagtgagatatgtgtgggagactcaaagaccaagggagcttcctttgaggaagattctggagggcctcttgtgtgtaaaaaggcagctgcaggcattgtctcctacgggaaaactgatggatcagctccacaggtcttcacgagagttttaagctttttatcctggataaagaaaactatgaaaaacagctaaatacaagaagcagcatggatcatttcctgactaaccatcttccctatagctgagtccaggagtgctctaggacagatggcagcaactgaataaagcacttttttctgactggaaaaaaaaaaaa

SEQ ID NO: 14650 - protein, 249 aa, Rattus norvegicus
  misc_feature (1)..(249): Xaa=Unknown amino acid
MPPVLILLTLLLPLGARAEEIIGGNEVSPHSRPYMAYFEFLNDNGKKTFCGGFLVRDNFVLTAAHCRGRSMTVTLGAHNIKAKEKTQQIIPVANATPHPAYNPDKRSNDIMLLKLVRSAKRTSAVRPLNLPRRNAHVKPGDVCYMAGWGKITPQGEFPNTLREVELTVQKDRVCESQFQRSYIKASEICVGDSKTKGASFEEDSGGPLVCKKAAAGIVSYGKTDGSAPQVFTRVLSFLSWIKKTMKNSX

SEQ ID NO: 14651 - DNA, 896 bp, Homo sapiens
  ref <308>: DATABASE ACCESSION NUMBER: EMBL / J03189
  ref <309>: DATABASE ENTRY DATE: 2000-03-04
gaattcggcagctccaaccagggcagccttcctgagaagatgcaaccaatcctgcttctgctggccttcctcctgctgcccagggcagatgcaggggagatcatcgggggacatgaggccaagccccactcccgcccctacatggcttatcttatgatctgggatcagaagtctctgaagaggtgcggtggcttcctgatacgagacgacttcgtgctgacagctgctcactgttggggaagctccataaatgtcaccttgggggcccacaatatcaaggaacaggagccgacccagcagtttatccctgtgaaaagagccatcccccatccagcctataatcctaagaacttctccaatgacatcatgctactgcagctggagagaaaggccaagcggaccagagctgtgcagcccctcaggctacctagcaacaaggcccaggtgaagccagggcagacatgcagtgtggccggctgggggcagacggcccccctgggaaaacattcacacacactacaagaggtgaagatgacagtgcaggaagatcgaaagtgcgaatctgacttacgccattattacgacagtaccattgagttgtgcgtgggggacccagagattaaaaagacttcctttaagggggactctggaggccctcttgtgtgtaacaaggtggcccagggcattgtctcctatggacgaaacaatggcatgcctccacgagcctgcaccaaagtctcaagctttgtacactggataaagaaaaccatgaaacgctactaactacaggaagcaaactaagcccccgctgtaatgaaacaccttctctggagccaagtccagatttacactgggagaggtgccagcaactgaataaatacctcttagctgagtgg

SEQ ID NO: 14652 - protein, 248 aa, Homo sapiens
  misc_feature (1)..(248): Xaa=Unknown amino acid
MQPILLLLAFLLLPRADAGEIIGGHEAKPHSRPYMAYLMIWDQKSLKRCGGFLIRDDFVLTAAHCWGSSINVTLGAHNIKEQEPTQQFIPVKRAIPHPAYNPKNFSNDIMLLQLERKAKRTRAVQPLRLPSNKAQVKPGQTCSVAGWGQTAPLGKHSHTLQEVKMTVQEDRKCESDLRHYYDSTIELCVGDPEIKKTSFKGDSGGPLVCNKVAQGIVSYGRNNGMPPRACTKVSSFVHWIKKTMKRYX

SEQ ID NO: 14653 - DNA, 3718 bp, Rattus norvegicus
  ref <308>: DATABASE ACCESSION NUMBER: EMBL / U67138
  ref <309>: DATABASE ENTRY DATE: 2000-09-30
tttcgattcgcctgaacagatgcggatcgacgcacagacccaaggatctcaagcttgggagctggcggcagtgctgtgcgcgccgcctggcctgaggggtggccaccttgccatgtcgctccgcacccactgaactaggaaagcccaaggatgtccgctctgaggaaggcttccccaccatctgaggcccggccatagtactacgcgatctcacagcagcttgcgaaccccagcctgcaccttgccagccaaaatggggacggctcaggttctgcccggcattctgcagaagcattgctgcatcttaccagacaggaacacagagtctcagtgcaccctttgcggagagccagaagaggaggaaggaggagacttggcccagccgggcctcagcttcccgggcccggcagaagaggacatagaccagcagtactcatggtccccaacgcagcacttcagtgaagagaggtactcacccgcacccaggaacatgaaagggttaactggaagccggaaccagcctcagctgtgtgtgggtcacacctgtggcctgtcgcccactgacgagtgtgagcacccccatgatcacgtgcgtcatgggccagacgtgcggcaaccttatcttctcagcccagccgagagctgcccaatggaccaccaccgctgctcacccaggagctccgtccactcagagtgtatgatgatgcctgtgatgttgggcgaccatgtgtccagcagcaccttccccagaatgcactacagttcacactacgacacgagggatgactgtgccacgtcccacgcgagtaccaaggtaaaccgcattcccgccaaccttttagaccagtttgagaaacagctacccctgcaccgggatggtttccacacactgcagtaccacagggcctcagctgccacagaacagcgaaatgagagtccaggcagaatcaggcatctggtccactccgtccagaaactctttaccaagtctcattctttggagggatcgtccaaaagcaacatcaatgggaccaagagcgagggtcggatggatgaccaccaccagagtcacctttccaaacacagcaaacggagtaagagcaaggagcggaagccagagagcaagcacaagtctggtatgagcagctggtggagttccgatgacaacctggacagtgacagcacataccggacacccagcgtggcccaccgccaccacatggaccacatcccacactgctaccctgaggcactgcagagcccgtttggggacctctcactaaagacttccaaaagcaacagtgatgttaagtgttccgcctgtgaaggcttggccctcacgccagacaccaggtacatgaagcgtagctcctggtccacgctcacggtgagccaggctaaggaggcctaccgcaagagctccctgaacttggacaagcccctggtccacccagagatcaagccttccttgcagccatgccactacctccaggtgcctcaggacgattggggtgcataccctacaggcggcaaagaggaggagatcccctgccgtaggatgaggagcggcagctacataaaagccatgggtgacgaggagagtggggaatcagactccagccccaaaacatccccgacggtggccctccggccggagccgctgctgaagtccatcatacaaagaccacttggagaccaccaaacccagagctacctgcaagctgccactgaggtgcctgtcggtcacagcctggacccatcagtcaactacaactctccgaagttccggtccagaaaccagagctacatgcgggctgtgagcaccctgagccaagccagctgtgtgagccagatgagtgaagcggaagttaatgggcagttcgagtcagtgtgtgaatctgtcttcagcgaagtcgaatctcaggccatggatgcccttgaccttcccgggtgtttccgaacaaggagtcacagctaccttcgagccatccaagctggttactcccaagacgatgaatgtattcccgtgatgacaccgtccaacatgacgtcaaccatcaggtcaacagcagctgtctcctacacaaattataagaagacgcctcccccggtgcctccacggaccacctccaagcctctgatctctgtgacggcccagagcagcacggaatccacacaggatgcctaccaggacagccgtgcccagaggatgtccccatggccccaagacagccgtggcggcctctacaactccatggacagtctagacagcaacaaggccatgaatttggctctggagtcagcggcagctcagcgccacgcggctgacactcagagcagctccacaaggagcattgacaaggcggtcctggtatccaaggctgaagagctcctcaaaagccgttgctcctccatcggggtccaggattctgaattccctgatcatcaaccctacccaaggtcagatgtagagacagccacggattccgacacggagagcagaggcctacgggagtaccactctgtaggcgtgcaagtggaagacgaaaaacggcacggccgtttcaagcgttccaacagcgtcacagctgctgtgcaggctgacttagagttggagggcttccctgggcatgtcagcatggaggacaagggcctgcagttcggatcctccttccagcgacattcagagcccagtaccccgacccagtatggggcactgaggactgtgcggacgcagggcctcttcagttacagggaggactataggacacaggtggacacttctactctgccgccaccggatccctggctggagccatccctggacacagtggagaccgggaggatgtctccgtgccgaagagatggctcgtggtttctgaaattgctgcacacagagacgaagaagatggaaggctggtgcaaagagatggagagggaagcggaagaaaatgacctctccgaagaaattctaggaaagatcaggagtgctgtgggaagtgcccagctgctcatgtcccagaagttccagcagttttattggctttgtcagcagaacatggaccccagcgccatgccaagaccgacatcacaggatctagctggctactgggatatgctgcagctgtctgtggaagatgtcagcatgaagttcgatgaactgcaccagctgaagctcaatgactggaagataatggagtcgcccgagagaaaggaagaaaggaagatcccccctccaataccaaagaagccccccaaggggaaattccccatcacaagggaaaagtccctggacctgccagacagacagcgccaggaagcccggcgccggctcatggcagccaagagagctgcctcgttccgccagaactctgccacggagagggcagacagcatcgagatctacatccccgaggcccagactcggctctgaggaccagaggtggccacacgcacctggttttgttctttttcacaaaatgcttgtacagtttattgcctacctggtagtttctgtctcaccctccaccggattcgcccttgccgtgctctctgcactgtagacagtggacgctccaattcctagtttgctgagctcgagctcctggcaagactgactctgaaggacatcgggctccgaggaacaggcctggtgagccctgacgtacgtccctgttctcagaagggccgccaagtggcctcttgaaaatggacccta

SEQ ID NO: 14654 - protein, 981 aa, Rattus norvegicus
  misc_feature (1)..(981): Xaa=Unknown amino acid
MKGLTGSRNQPQLCVGHTCGLSPTDECEHPHDHVRHGPDVRQPYLLSPAESCPMDHHRCSPRSSVHSECMMMPVMLGDHVSSSTFPRMHYSSHYDTRDDCATSHASTKVNRIPANLLDQFEKQLPLHRDGFHTLQYHRASAATEQRNESPGRIRHLVHSVQKLFTKSHSLEGSSKSNINGTKSEGRMDDHHQSHLSKHSKRSKSKERKPESKHKSGMSSWWSSDDNLDSDSTYRTPSVAHRHHMDHIPHCYPEALQSPFGDLSLKTSKSNSDVKCSACEGLALTPDTRYMKRSSWSTLTVSQAKEAYRKSSLNLDKPLVHPEIKPSLQPCHYLQVPQDDWGAYPTGGKEEEIPCRRMRSGSYIKAMGDEESGESDSSPKTSPTVALRPEPLLKSIIQRPLGDHQTQSYLQAATEVPVGHSLDPSVNYNSPKFRSRNQSYMRAVSTLSQASCVSQMSEAEVNGQFESVCESVFSEVESQAMDALDLPGCFRTRSHSYLRAIQAGYSQDDECIPVMTPSNMTSTIRSTAAVSYTNYKKTPPPVPPRTTSKPLISVTAQSSTESTQDAYQDSRAQRMSPWPQDSRGGLYNSMDSLDSNKAMNLALESAAAQRHAADTQSSSTRSIDKAVLVSKAEELLKSRCSSIGVQDSEFPDHQPYPRSDVETATDSDTESRGLREYHSVGVQVEDEKRHGRFKRSNSVTAAVQADLELEGFPGHVSMEDKGLQFGSSFQRHSEPSTPTQYGALRTVRTQGLFSYREDYRTQVDTSTLPPPDPWLEPSLDTVETGRMSPCRRDGSWFLKLLHTETKKMEGWCKEMEREAEENDLSEEILGKIRSAVGSAQLLMSQKFQQFYWLCQQNMDPSAMPRPTSQDLAGYWDMLQLSVEDVSMKFDELHQLKLNDWKIMESPERKEERKIPPPIPKKPPKGKFPITREKSLDLPDRQRQEARRRLMAAKRAASFRQNSATERADSIEIYIPEAQTRLX

SEQ ID NO: 14655 - DNA, 3412 bp, Homo sapiens
  misc_feature (1)..(3412): n=a, c, g or t
  ref <308>: DATABASE ACCESSION NUMBER: EMBL / AF009204
  ref <309>: DATABASE ENTRY DATE: 2001-10-26
gtgtggtctggcgcccccggaggactgcgagcacctgcaccacgggcccgacgcgcggccgccctacctgctgagccccgccgacagctgccccggggggcgccaccgctgctcgccgcgcagctcggtgcactcggagtgcgtgatgatgccggtggtgctgggcgaccacgtgtccagcagcaccttcccgcggatgcactacagctcgcactacgacacgcgcgacgactgcgctgtggcccacgcgggcgccaagatcaaccgcatcccggccaacctgctggaccagttcgagaagcagctgccgctgcaccgggacggcttccacacgctgcagtaccagaggacgtccgcggccgccgagcagcgcagcgagagccccgggcggatccgccacctggtacactccgtgcagaagntcttcaccaagtcgcactcgctggagggctcctccaaaagcaacgccaacggcaccaaggcggacggccgggcggacgaccaccaccacgcccaccacgccaagcanagcaagaggngcaagagcaaggagcgcaagccggagggcaagccccggcccggcatgagcagctggtggagctcggacgacaacctggacagcgacagcacctatcggacgcccagcgtgctcaaccggcaccacctgggccccgtggcccactgctaccccgacgngntgcagagccccttcggggacctgtccctcaagacctccaagagcaacaacgacgtcaagtgctcggcctgtgaggggttggcgctgacgcccgacgccaagtacctgaagcgcagctcctggtctacgctgacggtcagccaggccaaggaggcctaccgcaagagctcgctgaacctggacaagccgctgctgcaccaggacgccaagcccgccctgaggccgtgccactacctccaggtacctcaggatgagtggggagggtaccccaccggtggcaaagatgaggagattccctgcaggagaatgagaagtgggagttacattaaagccatgggggacgaggagagcggagagtcagactccagccccaagacatcaccaaagtcggcaatcctacnagagccgctgctgaagtccatcggacagagaccgcttggagagcaccagacccagacctacctgcaagctgcaagcgatgtgcctgtgggacacagcctggaccccgctgcgaactacaactccccgaaattccgctcccggaaccagagctacatgagggccgtcagcaccctgagccaggccagctgcgtgagccaggtgagcgaggcggagatcaatgggcaattcgagtccgtgtgcgagtccgtcttcagtgaagttgaatctcaggccatggatgccctcgacctcccgggatgtttccgaacaaggagtcacagctaccttcgagccattcaagccggctactcccaagatgacgaatgtattcccatgatgacaccctctgacatcacctccaccatcaggtcaacagcagctgtctcatatacaaattacaagaaaacgcccccaccggtgccccctcggaccacctccaagcctctgatctcggtgacggcgcagagcagcaccgaatccacccaggacgcctaccaggacagccgcgcacagaggatgtccccgtggccccaggacagccgcggcctctacaactccacggacagcctggacagcaacaaggccatgaacctcgcgctggagacggccgctgcccagcgccacctgccagagagccagagcagctctgtgcggaccagcgacaaggccatcctggtgtccaaggcggaggagctcctcaagagccgctgctcctccatcgggattcaggtggaaacggccacagattctgacacggagagcngcggtctgcgggaataccactctgtcggggtgcaagtggaagatgagaagcgacacggacgttttaaacgttctaacagcgtcacggccgccgtccaagctgacctggagctggaggggttcccaggccacatcaccacggaggacaaaggccttcagttcggctcatccttccagcggcactccgagcccagcacccccacccagtacagcgcggtgagaactgtacggacccaggggctcttcagctatagagaagactatcggacccaagtggacacctccaccctgccccctccagacccctggctggagcccgccatcgacacggtagagactgggaggatgtctccgtgccgcagggatggctcgtggtttttgaagctgctgcacgcagagacaaagaggatggaaggctggtgcaaagagatggagagagaggcggaggagaacgacctctcggaggaaattctcggtaaaatcaggagtgctgttgggagtgcccagcttctcatgtcccagaaattccagcagttttattggctttgccaacagaatatggaccccagcgccatgccgaggccgacgtcgcaggacctggccggctactgggacatgctgcagctctccattgaggacgtcagcatgaagttcgacgagctgcagcggctgcggctcaacgactggaagatgatggagtccccggaaagaaaggaagaaagaaaggtcccgcctccaataccaaagaagcctcccaaggggaagtttcccatcacaagagaaaaatccctggacctgcccgacagacaacgccaggaagcccggaggcgcctcatggccgccaagcgagcggcgtccttccggcagaattccgcctccgagcgcgcggacagcatcgagatctacatccccgaggcccagacccggctctgagggcggaggccggcgccttcccctcgtcgcttccgctttcccggacgcttgtgcagcgcggcgccgccctggtggtttctgtctcctcctcccgctgaacacgtcctcgctcccgcgctccccgcgccccggacacagcgggacgcggccggcggcctcagagtccacggagctcgcggcgaggacgacttctgcttttgttgttgttgttgttgttcacgggtggcctggctcacacttggctctgagggacaggtgtggcgagacctgatttctcctgcgtgttctcagaggacggcgagaaatgcctctggagctggaacccagcntacattttgttatttctatttttataaattgtgtgataattagaggtaagaataacaantaactataaacgggtgcatcccaccactccctggaggcattagacacccaagtggaaggtgctacaacctgaagcgcaggaaagaaaggcccattcccctcgcacagccgagcttttactccctgagcacgggccgctccgctcccctgctcctgtctgtctcggacagaaaacacgaggctccttgtgtc

SEQ ID NO: 14656 - DNA, 3077 bp, Rattus norvegicus
  ref <308>: DATABASE ACCESSION NUMBER: EMBL / U69278
  ref <309>: DATABASE ENTRY DATE: 2000-03-04
atatgctcctctcactgcccggtgcaccagcaacatggattgtcacctctccatcctcatcctgttcggctgctgcgtcctcagctgctccagggaactgagtccacagccttccaacgaagttaatctactagattcaaaaacgattcaaggagagctgggctggatctcctacccatcccacgggtgggaagagatcagtggtgttgatgagcattacacaccaatcaggacttaccaggtatgcaatgtcatggatcacagccaaaataattggctgaggacaaactgggtgccgagaaactcagctcagaagatctatgtggagctaaagttcacactgcgggactgtaacagcattccattggttttggggacttgcaaggagacctttaacctgtactacatggagtctgatgatgatcacggtgtcaaattcctagagcatcagtttacaaagattgacaccattgccgctgatgaaagtttcactcaaatggatctcggggaccgcattctaaaactcaacactgagattagagaagtgggaccagtcaataaaaaggggttttatttggcctttcaagatgttggtgcttgtgttgccttggtgtctgtgagagtgtacttcaaaaagtgcccatttacagtgaagaatctggctatgtttccagacacagtgcccatggactcccagtccttggtggaggttaggggctcttgtgtcaataattccaaggaggaggaccctcccaggatgtactgcagtacagaaggtgaatggctggtccccattggcaagtgcacctgcaatgctgggtatgaagaacgagggttcatatgccaagcttgtcggccaggcttctacaaggctttggatggtgttgccaagtgtactaagtgcccaccacacagctcaacccaagaagatggttcaatgaactgcaggtgtgagaataattatttccgggcagaaaaagaccctccatccatggcttgtacccgacctccatccgcaccaagaaatgttatctctaacataaatgagacctcggttatcctggactggagctggcccctggacacaggaggccggaaggatattaccttcaacatcatatgtaaaaaatgtgggtggaatgtcaggcagtgcgagccatgcagccccaacgtccgcttcctccctcgtcagcttggactcaccaacaccacggtgacagtgacagacctcctggcacatactaactacacctttgagattgatgccattaatggagtgtcagagctgagctcgccaccgagacagtttgccgccgtcagcatcacaactaatcaggctgctccatcaccagttatgacaattaagaaagatcggacttccagaaacagtatctctttatcttggcaagaaccagaacatccaaatggaattatacttgactacgaggtcaaatactatgaaaagcaggagcaagagacgagttataccattttgagggcaagaggcacaaatgttactatcagtagcctcaagccagatactacttacgtattccaaatccgagctcgaacagcagcaggatacggaaccaacagccgcaaatttgaatttgaaaatagtccagactccttctccatctctggtgagaacagtcatgtggtgatgattgcgatttcagctgctgtggccatcattgtcctcactgttgtcacctacgttttggtcgggagattttgtggctatcacaagtcaaaacacagttcagatgagaagcgccttcactttgggaatgggcacttaagacttccaggtctcaggacatatgttgatccacatacgtatgaagaccctacacaagcagttcatgagtttgcgaaagaattggatgccaccaacatagccatcgacaaagttgttggagcaggtgaatttggagaagtttgcagtggtcgcttaaagcttccttcaaaaaaagagatttcagtggctatcaagaccctgaaagtgggctacacggagaagcagaggagagactttctaggagaagcaagcatcatgggacagtttgaccaccccaacatcatccgactggaaggagttgtcactaaaagtaagccagtgatgattgtcacagaatacatggagaatggctccctggacagtttcttacgtaaacatgatgcccagtttacagtcatccagctcgtgggaatgctccgtgggatagcatctggtatgaagtacctctcagatatgggctatgtccaccgcgaccttgctgctcgaaacatcttgatcaacagtaacttggtgtgcaaagtctctgacttcggactttctcgagtgttggaagatgaccctgaagctgcttacaccaccagaggaggaaagataccagtaaggtggacatcaccagaagcaactgcctaccgcaagttcacatcagccagcgatgtatggagttacgggattgtactctgggaagtgatgtcttacggagaaaggccgtattgggagatgtccaatcaggatgttattaaggccgtggatgagggttatcgcctgccacttcccatggactgcccagctgccctgtatcagttgatgttggactgctggcagaaagacaggaacaacagacccaagtttgagcagatcgtcagcattctggacaagctcatccggaatccaggcagtctgaagatcatcacaagcgcggctgcaaggccatcaaaccttcttctggaccaaagcaatgtcgatattgctacgttccacacaacaggtgattggcttaacggtatgaggacagcacactgtaaggaaatcttcacgggtgtggagtacagctcctgtgacaccattgccaagatctccacagatgacatgaaaaaggttggtgttactgtggttgggccacagaagaagatcatcagttccattaaagctctagaaacacaatctaagaatggtccagttcccgtgtaaagtactggaaggatgtgaggaaagggaagatgcagcgtcatccagcaaacagatagaaatggtggagatgctgcagaagctccaagtc

SEQ ID NO: 14657 - protein, 984 aa, Rattus norvegicus
  ref <308>: DATABASE ACCESSION NUMBER: SWISS-Prot / O08680
  ref <309>: DATABASE ENTRY DATE: 2001-10-16
MDCHLSILILFGCCVLSCSRELSPQPSNEVNLLDSKTIQGELGWISYPSHGWEEISGVDEHYTPIRTYQVCNVMDHSQNNWLRTNWVPRNSAQKIYVELKFTLRDCNSIPLVLGTCKETFNLYYMESDDDHGVKFLEHQFTKIDTIAADESFTQMDLGDRILKLNTEIREVGPVNKKGFYLAFQDVGACVALVSVRVYFKKCPFTVKNLAMFPDTVPMDSQSLVEVRGSCVNNSKEEDPPRMYCSTEGEWLVPIGKCTCNAGYEERGFICQACRPGFYKALDGVAKCTKCPPHSSTQEDGSMNCRCENNYFRAEKDPPSMACTRPPSAPRNVISNINETSVILDWSWPLDTGGRKDITFNIICKKCGWNVRQCEPCSPNVRFLPRQLGLTNTTVTVTDLLAHTNYTFEIDAINGVSELSSPPRQFAAVSITTNQAAPSPVMTIKKDRTSRNSISLSWQEPEHPNGIILDYEVKYYEKQEQETSYTILRARGTNVTISSLKPDTTYVFQIRARTAAGYGTNSRKFEFENSPDSFSISGENSHVVMIAISAAVAIIVLTVVTYVLVGRFCGYHKSKHSSDEKRLHFGNGHLRLPGLRTYVDPHTYEDPTQAVHEFAKELDATNIAIDKVVGAGEFGEVCSGRLKLPSKKEISVAIKTLKVGYTEKQRRDFLGEASIMGQFDHPNIIRLEGVVTKSKPVMIVTEYMENGSLDSFLRKHDAQFTVIQLVGMLRGIASGMKYLSDMGYVHRDLAARNILINSNLVCKVSDFGLSRVLEDDPEAAYTTRGGKIPVRWTSPEATAYRKFTSASDVWSYGIVLWEVMSYGERPYWEMSNQDVIKAVDEGYRLPLPMDCPAALYQLMLDCWQKDRNNRPKFEQIVSILDKLIRNPGSLKIITSAAARPSNLLLDQSNVDIATFHTTGDWLNGMRTAHCKEIFTGVEYSSCDTIAKISTDDMKKVGVTVVGPQKKIISSIKALETQSKNGPVPV

SEQ ID NO: 14658 - DNA, 3149 bp, Homo sapiens
  ref <308>: DATABASE ACCESSION NUMBER: EMBL / M83941
  ref <309>: DATABASE ENTRY DATE: 1999-07-02
ccatggatggtaacttctccagcaatcagagcgctccccctcacatcagtggcatgcttcatggagatatgctcctctcactgccctctgcaccagcaacatggattgtcagctctccatcctcctccttctcagctgctctgttctcgacagcttcggggaactgattccgcagccttccaatgaagtcaatctactggattcaaaaacaattcaaggggagctgggctggatctcttatccatcacatgggtgggaagagatcagtggtgtggatgaacattacacacccatcaggacttaccaggtgtgcaatgtcatggaccacagtcaaaacaattggctgagaacaaactgggtccccaggaactcagctcagaagatttatgtggagctcaagttcactctacgagactgcaatagcattccattggttttaggaacttgcaaggagacattcaacctgtactacatggagtctgatgatgatcatggggtgaaatttcgagagcatcagtttacaaagattgacaccattgcagctgatgaaagtttcactcaaatggatcttggggaccgtattctgaagctcaacactgagattagagaagtaggtcctgtcaacaagaagggattttatttggcatttcaagatgttggtgcttgtgttgccttggtgtctgtgagagtatacttcaaaaagtgcccatttacagtgaagaatctggctatgtttccagacacggtacccatggactcccagtccctggtggaggttagagggtcttgtgtcaacaattctaaggaggaagatcctccaaggatgtactgcagtacagaaggcgaatggcttgtacccattggcaagtgttcctgcaatgctggctatgaagaaagaggttttatgtgccaagcttgtcgaccaggtttctacaaggcattggatggtaatatgaagtgtgctaagtgcccgcctcacagttctactcaggaagatggttcaatgaactgcaggtgtgagaataattacttccgggcagacaaagaccctccatccatggcttgtacccgacctccatcttcaccaagaaatgttatctctaatataaacgagacctcagttatcctggactggagttggcccctggacacaggaggccggaaagatgttaccttcaacatcatatgtaaaaaatgtgggtggaatataaaacagtgtgagccatgcagcccaaatgtccgcttcctccctcgacagtttggactcaccaacaccacggtgacagtgacagaccttctggcacatactaactacacctttgagattgatgccgttaatggggtgtcagagctgagctccccaccaagacagtttgctgcggtcagcatcacaactaatcaggctgctccatcacctgtcctgacgattaagaaagatcggacctccagaaatagcatctctttgtcctggcaagaacctgaacatcctaatgggatcatattggactacgaggtcaaatactatgaaaagcaggaacaagaaacaagttataccattctgagggcaagaggcacaaatgttaccatcagtagcctcaagcctgacactatatacgtattccaaatccgagcccgaacagccgctggatatgggacgaacagccgcaagtttgagtttgaaactagtccagactctttctccatctctggtgaaagtagccaagtggtcatgatcgccatttcagcggcagtagcaattattctcctcactgttgtcatctatgttttgattgggaggttctgtggctataagtcaaaacatggggcagatgaaaaaagacttcattttggcaatgggcatttaaaacttccaggtctcaggacttatgttgacccacatacatatgaagaccctacccaagctgttcatgagtttgccaaggaattggatgccaccaacatatccattgataaagttgttggagcaggtgaatttggagaggtgtgcagtggtcgcttaaaacttccttcaaaaaaagagatttcagtggccattaaaaccctgaaagttggctacacagaaaagcagaggagagacttcctgggagaagcaagcattatgggacagtttgaccaccccaatatcattcgactggaaggagttgttaccaaaagtaagccagttatgattgtcacagaatacatggagaatggttccttggatagtttcctacgtaaacacgatgcccagtttactgtcattcagctagtggggatgcttcgagggatagcatctggcatgaagtacctgtcagacatgggctatgttcaccgagacctcgctgctcggaacatcttgatcaacagtaacttggtgtgtaaggtttctgatttcggactttcgcgtgtcctggaggatgacccagaagctgcttatacaacaagaggagggaagatcccaatcaggtggacatcaccagaagctatagcctaccgcaagttcacgtcagccagcgatgtatggagttatgggattgttctctgggaggtgatgtcttatggagagagaccatactgggagatgtccaatcaggatgtaattaaagctgtagatgagggctatcgactgccaccccccatggactgcccagctgccttgtatcagctgatgctggactgctggcagaaagacaggaacaacagacccaagtttgagcagattgttagtattctggacaagcttatccggaatcccggcagcctgaagatcatcaccagtgcagccgcaaggccatcaaaccttcttctggaccaaagcaatgtggatatctctaccttccgcacaacaggtgactggcttaatggtgtccggacagcacactgcaaggaaatcttcacgggcgtggagtacagttcttgtgacacaatagccaagatttccacagatgacatgaaaaaggttggtgtcaccgtggttgggccacagaagaagatcatcagtagcattaaagctctagaaacgcaatcaaagaatggcccagttcccgtgtaaagcacgacggaagtgcttctggacggaagtggtggctgtggaaggcgtcaagtcatcctgcagacagacaataattctggagatactggtggaagtt

SEQ ID NO: 14659 - protein, 983 aa, Homo sapiens
  ref <308>: DATABASE ACCESSION NUMBER: PIR / A38224
  ref <309>: DATABASE ENTRY DATE: 1999-06-18
MDCQLSILLLLSCSVLDSFGELIPQPSNEVNLLDSKTIQGELGWISYPSHGWEEISGVDEHYTPIRTYQVCNVMDHSQNNWLRTNWVPRNSAQKIYVELKFTLRDCNSIPLVLGTCKETFNLYYMESDDDHGVKFREHQFTKIDTIAADESFTQMDLGDRILKLNTEIREVGPVNKKGFYLAFQDVGACVALVSVRVYFKKCPFTVKNLAMFPDTVPMDSQSLVEVRGSCVNNSKEEDPPRMYCSTEGEWLVPIGKCSCNAGYEERGFMCQACRPGFYKALDGNMKCAKCPPHSSTQEDGSMNCRCENNYFRADKDPPSMACTRPPSSPRNVISNINETSVILDWSWPLDTGGRKDVTFNIICKKCGWNIKQCEPCSPNVRFLPRQFGLTNTTVTVTDLLAHTNYTFEIDAVNGVSELSSPPRQFAAVSITTNQAAPSPVLTIKKDRTSRNSISLSWQEPEHPNGIILDYEVKYYEKQEQETSYTILRARGTNVTISSLKPDTIYVFQIRARTAAGYGTNSRKFEFETSPDSFSISGESSQVVMIAISAAVAIILLTVVIYVLIGRFCGYKSKHGADEKRLHFGNGHLKLPGLRTYVDPHTYEDPTQAVHEFAKELDATNISIDKVVGAGEFGEVCSGRLKLPSKKEISVAIKTLKVGYTEKQRRDFLGEASIMGQFDHPNIIRLEGVVTKSKPVMIVTEYMENGSLDSFLRKHDAQFTVIQLVGMLRGIASGMKYLSDMGYVHRDLAARNILINSNLVCKVSDFGLSRVLEDDPEAAYTTRGGKIPIRWTSPEAIAYRKFTSASDVWSYGIVLWEVMSYGERPYWEMSNQDVIKAVDEGYRLPPPMDCPAALYQLMLDCWQKDRNNRPKFEQIVSILDKLIRNPGSLKIITSAAARPSNLLLDQSNVDISTFRTTGDWLNGVRTAHCKEIFTGVEYSSCDTIAKISTDDMKKVGVTVVGPQKKIISSIKALETQSKNGPVPV

SEQ ID NO: 14660 - DNA, 4003 bp, Rattus norvegicus
  ref <308>: DATABASE ACCESSION NUMBER: EMBL / U70825
  ref <309>: DATABASE ENTRY DATE: 2000-03-04
agcacattcaccctctgaggcaagtcgccggccttttcagcgttttttgctgttctcccagggttaccagctgaagagccattcctggactccagcttcaacgtcatgggcagcccagaagggcgcttccatttcgccatcgaccgcggtggcaccttcacagatgtctttgcccagtgccctggagggcatgtgcgtgtcctgaagctgctctcagaggaccctgccaactatccagatgcacccacagagggcatccgccgaattctagagcaggaggagggtgtgctgctgcctcgaggccgaccgctagacaccagtcgcattgccagcatccgcatgggtaccacggtggccaccaatgcactgttggaacgacagggagaacgggtggcactgctggtgactcggggtttccgagacctgctgcatattggcactcaggcccgcccggacctctttgacttggctgtgcccatgccagaggttctgtatgaggaagtgctggaggtagatgagcgagtggtgctgtatcgcggagaaccaggtgccggctctcctgtcaaaggccgcacaggggacctgctagagatacagcagcctgtggacctggaagccctgcgtgggaagctggaggggctcttgtctcggggcattcacagtctggcagtggtgctcatgcattcgtacacgtgggcccagcatgagcagcaggtgggcacgctggcccgggagctgggcttcacgcacgtctccttgtcctcggaagtcatgcccatggtacgaattgttcctcggggccatacagcctgtgctgacgcttaccttactcccaccatccagcgctatgtgcagggcttccgccgaggcttccagggccagctaaagaatgtgcaagttctcttcatgcgctctgatggtggcctcgcacccatggatgctttcagtggttcccgggctgtgctctctggccctgctgggggtgtggttggctactcagctaccacctaccatctggaaggcggtcagcctgtcattggctttgacatgggaggcacatccacagacgtgagccgctatgctggagaatttgagcatgtctttgaggctagcacagcaggcgttacccttcaggcaccccagttggacatcaacacagtggcagctggcgggggttcccgcctcttcttcagatctggcctctttgtggttggtccagagtcagcaggtgcccacccaggtcctgcctgctaccgtaaagggggtcctgtgacagtgacagatgctaatctggtcctgggtcgcctgctgcctgcctccttcccctgcatttttgggccaggagaagaccagccactgtctcctgaggcttcccgaaaggctctagaggctgtggccatggaggtcaacagtttcttgaccaatggaccgtgcccagcttcccaactaagtctggaagaggtggccatggggtttgtgcgtgttgccaatgaagccatgtgccggcctatccgtgccctcacacaggcacgaggccatgacccctcagcccatgtattggcttgctttggaggagctggtgggcaacacgcttgtgccattgcccgggccctggggatggatactgtgcacattcacaggcacagcgggctgctgtcagcactaggactggccttggcagatgtggttcacgaagcacaggagccctgttccctgtcttacacacctgaaacctttgcacaactggaccagagactgagccgcctggaggagcagtgtgtggatgccttgcaggtccagggcttccctaggtctcagatcagcaccgagagcttcctgcatcttcgctaccaaggcactgactgcgccctaatggtgtctgcccatcagcatccggccacagcctgctcaccccgagctggtgactttggagccgcatttgtggagaggtacatgagagagtttggcttcattatccccgagcggccggtggtggtagatgatgtacgtgtgaggggaactggccgtagtggacttcagctggaggacacccccaaaatccagactggacctccccacgtggaaaaggtgacccagtgctactttgaagggggttatcaggagactcccgtgtaccttttaggagaactaggctacgggcaccagctccaagggccctgccttatcatcgacaacaacagcaccatccttgtagaaccgggttgccaagcagaggtgactgatacaggggacatccgcatttctgtgggagctgagggtcctagtatggcagataccaggcttgaccccatccagctgtctattttctcacaccgcttcatgagcattgctgagcagatgggccgcatcctacagcgcacagccatctctaccaacatcaaggaacgcctcgacttctcctgtgccctctttgggccagatgggggcctcgtctccaatgctccccacattcctgtgcacctgggtgccatgcaagagactgtacagttccagattcagcacttaggagccgacctccatcctggtgatgtgttgctcagcaaccatcccagcgcagggggcagccatcttcctgacctgactgtcattacaccggtgttttggccaggccagacgaggcctgtgttctacgtggctagccgagggcaccacgcagacattggaggaatcacaccgggctctatgccgcctcactccaccacgctgcaacaggagggtgccgtttttctgtccttcaaactggtccagggaggcgtcttccaggaagaggcagtgacagaggccctacgggcaccaggcaagatctctggctgtagtggaaccaggaacctgcatgacaacctgtcggatcttcgtgcccaggtggcagctaaccagaaaggcatccagctggtgggagagctgatcggacagtatggcttagatgtggtgcaggcctatatgggccatattcaggcgaatgctgagctagcagtgagagacatgctccgggcttttggaacttcccggcaggccaggggcctgcccctggaggtgtctgcagaggatcacatggatgatggctctcccatctgtctgcgtgttcagatcaacctgagtcagggcagtgcggtatttgactttactggttccgggtctgaggtgtttggcaatctcaatgccccgagagccataacactgtctgctctcatctattgcttacgctgtctagtgggccgtgacatcccacttaaccagggttgcctggctcctgtgcgtgtcataattcccaaaggctccatattggatccatccccagaggcagcagtggtcggcggcaacgtgctcacatctcagcgagtagtggatgtcattctgggggcttttggggcctgttcagcctcccagggctgcatgaacaatgtgaccctgggcaatgcccgtatgggctactatgagacagtggctggtggtgccggtgcgggccctggctggcatgggcgcagtggtgtacacagtcacatgaccaacacacgcattacggatccagagattctggagagtcggtatccagttatcctgcgccgctttgagctgaggccaggctccgggggccgaggtcgcttccggggaggtgatggcgtagtccgagagctggtctttcgggaagaggcgctgttgtctgtgctcaccgagcgccgggccttccagccttacggcctccacgggggagagcctggtgcgcgtggcttaaacctcctgatcagaaaagatgggcgcacagtgaatttgggcggcaagacatctgtgaccgtgtaccccggggacgtgttctgcctccacacgcctgggggtgggggctacggagacccggaggatccagcgccaccaccaggctcgcccccgctatttccagccttccccgagcgcggcagtgtattcgagtaccgccgcgcccaggaagccgtatgagtgccccacaataaagatcctttgaatcgca

SEQ ID NO: 14661 - protein, 1288 aa, Rattus norvegicus
  ref <308>: DATABASE ACCESSION NUMBER: SWISS-Prot / P97608
  ref <309>: DATABASE ENTRY DATE: 1998-12-15
MGSPEGRFHFAIDRGGTFTDVFAQCPGGHVRVLKLLSEDPANYPDAPTEGIRRILEQEEGVLLPRGRPLDTSRIASIRMGTTVATNALLERQGERVALLVTRGFRDLLHIGTQARPDLFDLAVPMPEVLYEEVLEVDERVVLYRGEPGAGSPVKGRTGDLLEIQQPVDLEALRGKLEGLLSRGIHSLAVVLMHSYTWAQHEQQVGTLARELGFTHVSLSSEVMPMVRIVPRGHTACADAYLTPTIQRYVQGFRRGFQGQLKNVQVLFMRSDGGLAPMDAFSGSRAVLSGPAGGVVGYSATTYHLEGGQPVIGFDMGGTSTDVSRYAGEFEHVFEASTAGVTLQAPQLDINTVAAGGGSRLFFRSGLFVVGPESAGAHPGPACYRKGGPVTVTDANLVLGRLLPASFPCIFGPGEDQPLSPEASRKALEAVAMEVNSFLTNGPCPASQLSLEEVAMGFVRVANEAMCRPIRALTQARGHDPSAHVLACFGGAGGQHACAIARALGMDTVHIHRHSGLLSALGLALADVVHEAQEPCSLSYTPETFAQLDQRLSRLEEQCVDALQVQGFPRSQISTESFLHLRYQGTDCALMVSAHQHPATACSPRAGDFGAAFVERYMREFGFIIPERPVVVDDVRVRGTGRSGLQLEDTPKIQTGPPHVEKVTQCYFEGGYQETPVYLLGELGYGHQLQGPCLIIDNNSTILVEPGCQAEVTDTGDIRISVGAEGPSMADTRLDPIQLSIFSHRFMSIAEQMGRILQRTAISTNIKERLDFSCALFGPDGGLVSNAPHIPVHLGAMQETVQFQIQHLGADLHPGDVLLSNHPSAGGSHLPDLTVITPVFWPGQTRPVFYVASRGHHADIGGITPGSMPPHSTTLQQEGAVFLSFKLVQGGVFQEEAVTEALRAPGKISGCSGTRNLHDNLSDLRAQVAANQKGIQLVGELIGQYGLDVVQAYMGHIQANAELAVRDMLRAFGTSRQARGLPLEVSAEDHMDDGSPICLRVQINLSQGSAVFDFTGSGSEVFGNLNAPRAITLSALIYCLRCLVGRDIPLNQGCLAPVRVIIPKGSILDPSPEAAVVGGNVLTSQRVVDVILGAFGACSASQGCMNNVTLGNARMGYYETVAGGAGAGPGWHGRSGVHSHMTNTRITDPEILESRYPVILRRFELRPGSGGRGRFRGGDGVVRELVFREEALLSVLTERRAFQPYGLHGGEPGARGLNLLIRKDGRTVNLGGKTSVTVYPGDVFCLHTPGGGGYGDPEDPAPPPGSPPLFPAFPERGSVFEYRRAQEAV

SEQ ID NO: 14662 - DNA, 3141 bp, Homo sapiens
  ref <308>: DATABASE ACCESSION NUMBER: EMBL / AL096750
  ref <309>: DATABASE ENTRY DATE: 2000-02-18
ggtccctcgggggcacacggcctgtgccgacgcctacctcacgcccgccatccagcgctacgtgcagggcttctgccgtggcttccagggccaactcaaggatgtgcaggtgttgttcatgcgctccgatggcggcctggcgcccatggacaccttcagcggctccagtgctgtgctctcgggcccggccggcggcgtggtgggctactcagccaccacctaccagcaggagggtggccagcctgtcatcggctttgacatgggaggcacgtccacggatgtgagccgctatgctggggaattcgagcacgtcttcgaggccagcacagctggcgtcaccctccaggccccgcagctggacatcaacaccgtggcagcgggagggggttcccgcctcttcttcaggtctggcctctttgtggttgggcccgagtcagcaggagcccacccaggacccgcctgctaccgcaaaggtaagagtcaggatctggccggcctggccttgccctccgcttgccgccgcaggcccagcccctcctgtcagccctatccctgctgcctactcctgctcccctgcctccagcccccaagccccacaccctgtccacctcccagggggccctgtgacagtgacggatgctaatctggtcctgggtcgcctgctgcctgcctccttcccctgcatttttgggccgggagagaaccaaccactttcccctgaggcctcccgcaaagccctggaggctgtggccactgaggtcaacagcttcctgaccaacgggccctgcccggcctccccgctgagcctggaggaggtggccatggggttcgtgcgcgtggccaacgaggccatgtgccggcccatccgtgcactcacgcaggtacgtccacctctgctctcccgcctgtcctgcccccagcctttgtggagcggtacatgagggagtttggctttgtcatacctgagcggccggtggtcgtggacgatgtgcgagtgcggggcaccggccgcagtggtcttcgcctcgaggatgcccccaaagcccagaccgggcctccccgggtggacaagatgacccagtgctactttgaggggggctaccaggagacccctgtgtacctgctggcagagctgggctatgggcacaagctccatgggccctgcctcatcatcgacagtaacagcaccatcctggtggagccaggttgccaggcagaggtgaccaagacaggggacatctgcatctccgtgggggccgaagtccccggcacagtgggcccccagctggaccctatccagctgtccatcttctcacaccgcttcatgagcattgctgagcagatgggccgcatcctgcagcgcacagccatctccaccaacatcaaggagcgtctggacttctcctgtgccctctttgggcccgatggggggctggtgtccaatgccccccacatccctgtgcacctgggtgccatgcaggagacggtgcagttccagattcagcacctgggggccgatctccaccctggcgacgtgctactgagcaaccatcccagtgccgggggcagccacctgccagacctgactgttatcacaccggtgttttggccgggtcagacgcggcctgtgttctatgtggccagccgagggcaccacgcagacatcgggggcatcacaccaggctccatgcccccccactccaccatgctgcaacaggagggtgccgtctttctgtccttcaaacttgtccaggggggcgtcttccaggaggaggcggtgacggaggccctgcgggcgccaggcaaggtccccaactgcagcggaaccagaaacctgcacgacaacctgtcggacctccgtgcccaggtggcagccaaccagaagggcatccagctggtgggggagctcattgggcagtacggcctggacgtggtgcaggcctacatgggccatattcaggcaaacgctgagctggccgtgcgagacatgttgcgtgcctttggaacctcccggcaggcccggggcctgcccctggaggtgtcctcggaagaccacatggacgacggttcccccatccgcctccgtgtgcagatcagcctgagtcagggcagcgctgtgtttgacttcagcggcactgggccggaggtgtttggtaatctcaacgcaccgcgggccgtaaccctgtccgccctcatctactgcctgcgctgtctggtgggccgcgacatcccactcaaccagggctgcctggcgccagtgcgcgtggtcattccccgaggctccatcctggacccgtcgcccgaggcggcggtggtgggcggcaacgtgctcacgtcgcagcgcgtggtggatgtcatcctgggggcctttggggcctgcgccgcctcccagggctgcatgaacaacgtgaccctgggcaacgcccacatgggctactacgagacggtggcgggcggcgcgggcgcgggtcccagctggcacgggcgcagcggtgtgcacagccacatgaccaacacacgcatcaccgaccctgagatcctggagagccggtacccggtcatcctgcgccgcttcgagctgcggcggggctcggggggcagaggccgcttccgaggcggcgacggcgtcacccgcgagctgctctttcgtgaggaggcgctgctgtcagtgctgaccgagcgccgcgccttccggccatacgggctccacggtgcgcggttccccagccctcgcggccctccccgcccccgcccccacccccgcccctggtctctctggactcctcgcctccctccgcagggggcgagcctggcgcccgcggcctaaacctgctgatccgcaaaaacggccggacggtgaatctgggcggcaagacgtcggtgaccgtgtaccccggggatgtgttctgtctccacacgcccggcggcggtggctatggggacccggaggaccccgccccaccgccggggtcgcccccgcaagcactggcctttcccgagcacggcagcgtctatgagtatcgccgggcccaggaggccgtgtgaggatcccgcaataaagatgccttaagtctcccggttctggggacgcagctaaaaaaaaaaaaaaaaaaaaaaaaaaaaaaaaaaaaaaaaaaaaaa

SEQ ID NO: 14663 - DNA, 2526 bp, Rattus norvegicus
  ref <308>: DATABASE ACCESSION NUMBER: EMBL / U75358
  ref <309>: DATABASE ENTRY DATE: 2000-03-04
agattgatggccttacagaaacaactggatatagaacttaaagtaaagcaaggtgccgagaacatgatacagatgtactcaaatggcccttcaaaggatcggaaactccatggtacagctcaacaactgctccaggataacaagacaaaaatagaagtcatccgaatgcacattcttcaggccgtcctgaccaatgagctggcttttgataatgcaaaacctgtgataagccctcttgagcttcggaatggaagaattatagaacatcattttaggatagaatttgcagtagccgaaggtgcaaagaatgtcatgaaattacttggctcaggaaaagtaacagacagaaaagcgctttcagaagcccaagcaagatttaatgaatcaagtcagaagttggaccttttaaaatattcactagagcagaggttaaatgaactccccaagaatcaccccaaaagcagtgtcgtcattgaggagctctcccttgttgcatcgccaaccctgagtccacgacagagtatgttgtccacgcagaaccagtacagcacattgtccaagccagcagcacttaccggtactttggaagttcgtctatggggtgccaagatatcctgggagaatgtccctggacggtcaaaagcgacatccgtagcactgcctggatggagtccaagtgaaaacagatcatcgtttatgagcagaactagtaaaagtaaaagtggaagcagtcgcaacctcctgaaaaccgacgacttgtccaatgatgtttgtgctgttttgaagctagataatactgtggttggtcaaactatctggaagcccatttccaatcagtcgtgggaccagaagtttacactggaactagacaggtcacgtgaactggaaatttcagtttattggcgtgattggagatctctgtgtgctgtaaaatttctgaggttagaagattttttagacaaccagcggcatggcatggccctttatttggaaccccagggtactttgtttgcagaggttactttttttaatccagttattgaaagacgaccaaaactccaaagacaaaagaaaattttttcaaaacaacaaggcaaaacatttctcagagcccctcaaatgaatattaatattgccacttggggaaggctagtgagacgagctattcccacagtaaatcattctggcacgttcagccctcagactcctgtgcccgctacagtgccagtggtggatgcacgcactcctgaactcgcacctccagccagtgattctacagtaaccaaattggactttgatcttgaacctgaagctcctccagccccaccacgtgcttcttcccttggagagatagatgactcttctgaattgagagttttggatatacctggacagggttcagaaactgttttcgatattgagaatgacagaaataacatgcgtccaaaatccaaatctgaatatgagcttaacattcctgactcaagtcgaagctgttggagtgttggagaacttgaggacaagagatctcaacagaggtttcagtttaatctacaagacttcaggtgctgtgctgtcttggggagaggacactttggaaaggtgctgttggcagaatataaacacacaaatgaaatgtttgcaataaaagccttaaagaaaggggacattgtggcacgagatgaagtagacagcttgatgtgtgaaaaaagaatttttgagactgtgaacagtgtccggcatcctttcctagtgaacctgtttgcatgtttccaaaccaaagagcatgtttgctttgtgatggagtacgctgctggtggggacctgatgatgcacatccacactgacgtcttctctgaacccagagctgtattttatgcagcatgtgtagttcttggattgcaatatttacatgaacacaaaattgtttatagagacttgaagttggataacctgttgctggatacagaagcttccgtgaagattgcggactttggtctttgcaaagaaggaatggggtatggagataggacaagcacattttgtggtactcctgaattccttgccccagaagtattaacagaaacgtcgtacacaagggctgtagattggtggggccttggcgttcttatatatgaaatgctcgtcggagagtctccctttcctggtgatgatgaagaagaggtttttgacagtattgtaaatgacgaagtaaggtatccaaggttcttatctacagaagccatttccataatgagaaggctgttgaggaggaatcctgagcggcgcctgggagctggtgagaaagatgccgaggatgtaaagaagcacccgtttttccggctaaccgactggagtgcactactggacaagaaagtaaagccaccatttgtacctaccattagaggacgggaagatgttagtaactttgatgatgaatttacctcagaagcacctattctgactccccctcgagaaccgaggatactcttggaggaggagcaggagatgttccgcgattttgac

SEQ ID NO: 14664 - protein, 842 aa, Rattus norvegicus
  ref <308>: DATABASE ACCESSION NUMBER: SWISS-Prot / AAB53364
  ref <309>: DATABASE ENTRY DATE: 2000-05-30
RLMALQKQLDIELKVKQGAENMIQMYSNGPSKDRKLHGTAQQLLQDNKTKIEVIRMHILQAVLTNELAFDNAKPVISPLELRNGRIIEHHFRIEFAVAEGAKNVMKLLGSGKVTDRKALSEAQARFNESSQKLDLLKYSLEQRLNELPKNHPKSSVVIEELSLVASPTLSPRQSMLSTQNQYSTLSKPAALTGTLEVRLWGAKISWENVPGRSKATSVALPGWSPSENRSSFMSRTSKSKSGSSRNLLKTDDLSNDVCAVLKLDNTVVGQTIWKPISNQSWDQKFTLELDRSRELEISVYWRDWRSLCAVKFLRLEDFLDNQRHGMALYLEPQGTLFAEVTFFNPVIERRPKLQRQKKIFSKQQGKTFLRAPQMNINIATWGRLVRRAIPTVNHSGTFSPQTPVPATVPVVDARTPELAPPASDSTVTKLDFDLEPEAPPAPPRASSLGEIDDSSELRVLDIPGQGSETVFDIENDRNNMRPKSKSEYELNIPDSSRSCWSVGELEDKRSQQRFQFNLQDFRCCAVLGRGHFGKVLLAEYKHTNEMFAIKALKKGDIVARDEVDSLMCEKRIFETVNSVRHPFLVNLFACFQTKEHVCFVMEYAAGGDLMMHIHTDVFSEPRAVFYAACVVLGLQYLHEHKIVYRDLKLDNLLLDTEASVKIADFGLCKEGMGYGDRTSTFCGTPEFLAPEVLTETSYTRAVDWWGLGVLIYEMLVGESPFPGDDEEEVFDSIVNDEVRYPRFLSTEAISIMRRLLRRNPERRLGAGEKDAEDVKKHPFFRLTDWSALLDKKVKPPFVPTIRGREDVSNFDDEFTSEAPILTPPREPRILLEEEQEMFRDFD

SEQ ID NO: 14665 - DNA, 2118 bp, Rattus norvegicus; identical to SEQ ID NO: 13859
  ref <308>: DATABASE ACCESSION NUMBER: EMBL / U87627
  ref <309>: DATABASE ENTRY DATE: 2000-03-04

SEQ ID NO: 14666 - protein, 489 aa, Rattus norvegicus; identical to SEQ ID NO: 8751
  ref <308>: DATABASE ACCESSION NUMBER: SWISS-Prot / Q63344
  ref <309>: DATABASE ENTRY DATE: 2002-06-15

SEQ ID NO: 14667 - DNA, 1982 bp, Homo sapiens; identical to SEQ ID NO: 13861
  ref <308>: DATABASE ACCESSION NUMBER: EMBL / U81800
  ref <309>: DATABASE ENTRY DATE: 2000-03-04

SEQ ID NO: 14668 - protein, 465 aa, Homo sapiens; identical to SEQ ID NO: 13862
  ref <308>: DATABASE ACCESSION NUMBER: SWISS-Prot / O15427
  ref <309>: DATABASE ENTRY DATE: 2001-10-16

SEQ ID NO: 14669 - DNA, 2636 bp, Rattus norvegicus
  misc_feature (1)..(2636): n=a, c, g or t
  ref <308>: DATABASE ACCESSION NUMBER: EMBL / U89744
  ref <309>: DATABASE ENTRY DATE: 2000-03-04
ttcccggagaaagacgatgagtcagtcgtctggtggtaccagcactcccaccacaacagcgactcagcccaccagtacttcaactcagacacctgggacaactcagcttcttagtactaccagcactcctaccacaacagcgactcagcccaccagtacttcaactcagacccctgggacaactcagcttcctagtactaccagcactcccaccacaacagcgactcagcccaccngtacttcaackcagacccctgggacaactcagcttcctggtactaccagcactcccaccacaacagcgactcagcccaccagtacttcatttcagacccctgggacaactcagcttcctagtagtaccagcactcccaccacaacagcgactcagcccaccagtactgcatctcagacccctgggacaactcagcctcctggtggtgccagctctcccaccacaacagtgactcagcccacnggtagttcatctcagacccctgggacaactcagcctcctggtggtgccagcactcccaccacaacagtgactcagcccaccggtagttcatctcagacctctgggacaactcagcctcctggtggtgccagctcttccacagtgactagcagcagtagcacaggttccaatgatccttgcaactctaacccctgtaaatcacctgcttcttgtgtcaagctgtatgacagctacttctgcttgtgtttagaaggctactactacaacaattcttcgtcatgtgtgaaaggaacgacattccctggagagattggcatgagcgtaaatgaaacaactgacttggaagataaaaactctgtgaactatcaaactttgcacagcagtgttgttaagttttttgaaaacacgtttaagaagactgactatggacagactgtgattcttaaagtgagcaaagactctttaatgtcatcaagatctgtgatgcgtgctgctacgcagacagtctatgtatcagtagtaaatatgtttggagaaaacacaaaggaggatgaagagagtgtagcttctgtgatcaaggaggcagttaagacggataacaatgtggaacgctatttccaacaagatcggtgtgattattatggctgtgtgaagagtggcagcaatgtttgccggaatggtttacaatgcacgtgcaaacctgggctggagagactgaacccgcaggttcctttttgtgttgctccaacatgttctgagccctgcagtgcagagaagaagcagctatgcttaaagaaggataatggagcgatggagtgtgggtgcatggcaggctaccggaaggcgaacgggaaatgtgaagagtgtccttttggctacagcgggatggattgcaaagaccaatttcagctgatcctcaccattgtgggaaccattgctggagctttcatcctcatcttgctaattgtttttatcgtctccatgaggtcaaagaacaaaaagaagagtggagaagagcagaatctgattgaggatgactttcataacctgcgaatgaggccaaccggcttctccaacttcggagcagacaccagcatcttccccaaagtcaaaacaggggtcccgagtcagacctctaatccctacgcaaaccaccgaagcatgcctcgccctgactactagaatgataagaatttggaaccttccctagcccagctcacatggtgatcttaaggacaaggagaaatggacagagacaaaggtttgacctccagcgttcctctgctccgtttgcttcaacctgtgtgaagaacgcagcttgctgaagatacaactatcaaattaaatgcacatggacactatgagcctttctttgtaagagttgattttctccagttagtacagaacactacagcggggattggtgtggggatttttctttcctggtgggccaacggttagtgtttccaatccagagggagcaccctcataatagctcatccctgagcagtgccactcctgagctctggactctggctacccttgaacagtcagctgcctgtgatagggcctcactccaaggagacaggcaagagacagaaacatctcccagctttntcaggaggactgtggggacccaggtaccttcacatgagaataaggaggcttggactagctctntcttckgtgggaacgttcaagtctttgacatgttagttggtaggaaaagcagggaggaaaaacatgagcacaggtagtagagagagaccaaggaagctatgctgggaggctgagggagggagaaggtagcaggtagcatcttctcccttgatgaagtccctcctcaggcagcaaatgggtgctctcgggcgccgccatcaccaagacatagatcccgagaaacccataaaagcaggagtcagtgttgaagccactgtgacagcacaggcattctgtctaggactctgtcagangggccgggtgttgtccactcaatgacgcttcactgggcctcagcctgctccataatggaagcttagcagtggccaccaacatgttacacacacacacacacacacacacacacacacacactcacacactcacatacactcacacacactcacacaccccacacacacacactcacaagcggccc

SEQ ID NO: 14670 - protein, 548 aa, Rattus norvegicus
  misc_feature (1)..(548): Xaa=Unknown amino acid
MSQSSGGTSTPTTTATQPTSTSTQTPGTTQLLSTTSTPTTTATQPTSTSTQTPGTTQLPSTTSTPTTTATQPTXTSTQTPGTTQLPGTTSTPTTTATQPTSTSFQTPGTTQLPSSTSTPTTTATQPTSTASQTPGTTQPPGGASSPTTTVTQPTGSSSQTPGTTQPPGGASTPTTTVTQPTGSSSQTSGTTQPPGGASSSTVTSSSSTGSNDPCNSNPCKSPASCVKLYDSYFCLCLEGYYYNNSSSCVKGTTFPGEIGMSVNETTDLEDKNSVNYQTLHSSVVKFFENTFKKTDYGQTVILKVSKDSLMSSRSVMRAATQTVYVSVVNMFGENTKEDEESVASVIKEAVKTDNNVERYFQQDRCDYYGCVKSGSNVCRNGLQCTCKPGLERLNPQVPFCVAPTCSEPCSAEKKQLCLKKDNGAMECGCMAGYRKANGKCEECPFGYSGMDCKDQFQLILTIVGTIAGAFILILLIVFIVSMRSKNKKKSGEEQNLIEDDFHNLRMRPTGFSNFGADTSIFPKVKTGVPSQTSNPYANHRSMPRPDYX

SEQ ID NO: 14671 - DNA, 6732 bp, Homo sapiens
  ref <308>: DATABASE ACCESSION NUMBER: EMBL / X63564
  ref <309>: DATABASE ENTRY DATE: 1992-02-13
gagagcgcggccgggacggttggagaagaaggcggctccccggaagggggagagacaaactgccgtaacctctgccgttcaggaacccggttacttatttattcgttaccctttttcttcttcctcccccaaaaaccttttccttttcccttctttttttttcctttttgggagctgaaaaatttccggtaagggaaagaagggctcctttcgctccttatttcgccgcctccttccctccgccaccttcccctcctccggctttttcctcccaactcggggaggtccttcccggtggccgccctgacgaggtctgagcacctaggcggaggcggcgcaggctttttgtagtgaggtttgcgcctgcgcaggcgcctgcctccgccatgcacgggggtggccccccctcgggggacagcgcatgcccgctgcgcaccatcaagagagtccagttcggagtcctgagtccggatgaactgaagcgaatgtctgtgacggagggtggcatcaaatacccagagacgactgagggaggccgccccaagcttggggggctgatggacccgaggcagggggtgattgagcggactggccgctgccaaacatgtgcaggaaacatgacagagtgtcctggccactttggccacattgaactggccaagcctgtgtttcacgtgggcttcctggtgaagacaatgaaagttttgcgctgtgtctgcttcttctgctccaaactgcttgtggactctaacaacccaaagatcaaggatatcctggctaagtccaagggacagcccaagaagcggctcacacatgtctacgacctttgcaagggcaaaaacatatgcgagggtggggaggagatggacaacaagttcggtgtggaacaacctgagggtgacgaggatctgaccaaagaaaagggccatggtggctgtgggcggtaccagcccaggatccggcgttctggcctagagctgtatgcggaatggaagcacgttaatgaggactctcaggagaagaagatcctgctgagtccagagcgagtgcatgagatcttcaaacgcatctcagatgaggagtgttttgtgctgggcatggagccccgctatgcacggccagagtggatgattgtcacagtgctgcctgtgcccccgctctccgtgcggcctgctgttgtgatgcagggctctgcccgtaaccaggatgacctgactcacaaactggctgacatcgtgaagatcaacaatcagctgcggcgcaatgagcagaacggcgcagcggcccatgtcattgcagaggatgtgaagctcctccagttccatgtggccaccatggtggacaatgagctgcctggcttgccccgtgccatgcagaagtctgggcgtcccctcaagtccctgaagcagcggttgaagggcaaggaaggccgggtgcgagggaacctgatgggcaaaagagtggacttctcggcccgtactgtcatcacccccgaccccaacctctccattgaccaggttggcgtgccccgctccattgctgccaacatgacctttgcggagattgtcacccccttcaacattgacagacttcaagaactagtgcgcagggggaacagtcagtacccaggcgccaagtacatcatccgagacaatggtgatcgcattgacttgcgtttccaccccaagcccagtgaccttcacctgcagaccggctataaggtggaacggcacatgtgtgatggggacattgttatcttcaaccggcagccaactctgcacaaaatgtccatgatggggcatcgggtccgcattctcccatggtctacctttcgcttgaatcttagcgtgacaactccgtacaatgcagactttgacggggatgagatgaacttgcacctgccacagtctctggagacgcgagcagagatccaggagctggccatggttcctcgcatgattgtcaccccccagagcaatcggcctgtcatgggtattgtgcaggacacactcacagcagtgcgcaaattcaccaagagagacgtcttcctggagcggggtgaagtgatgaacctcctgatgttcctgtcgacgtgggatgggaaggtcccacagccggccatcctaaagccccggcccctgtggacaggcaagcaaatcttctccctcatcatacctggtcacatcaattgtatccgtacccacagcacccatcccgatgatgaagacagtggcccttacaagcacatctctcctggggacaccaaggtggtggtggagaatggggagctgatcatgggcatcctgtgtaagaagtctctgggcacgtcagctggctccctggtccacatctcctacctagagatgggtcatgacatcactcgcctcttctactccaacattcagactgtcattaacaactggctcctcatcgagggtcatactattggcattggggactccattgctgattctaagacttaccaggacattcagaacactattaagaaggccaagcaggacgtaatagaggtcatcgagaaggcacacaacaatgagctggagcccaccccagggaacactctgcggcagacgtttgagaatcaggtgaaccgcattcttaacgatgcccgagacaagactggctcctctgctcagaaatccctgtctgaatacaacaacttcaagtctatggtcgtgtccggagctaaaggttccaagattaacatctcccaggtcattgctgtcgttggacagcagaacgtcgagggcaagcggattccatttggcttcaagcaccggactctgcctcacttcatcaaggatgactacgggcctgagagccgtggctttgtggagaactcctacctagccggcctcacacccactgagttctttttccacgccatggggggtcgtgaggggctcattgacacggctgtcaagactgctgagactggatacatccagcggcggctgatcaagtccatggagtcagtgatggtgaagtacgacgcgactgtgcggaactccatcaaccaggtggtgcagctgcgctacggcgaagacggcctggcaggcgagagcgttgagttccagaacctggctacgcttaagccttccaacaaggcttttgagaagaagttccgctttgattataccaatgagagggccctgcggcgcactctgcaggaggacctggtgaaggacgtgctgagcaacgcacacatccagaacgagttggagcgggaatttgagcggatgcgggaggatcgggaggtgctcagggtcatcttcccaactggagacagcaaggtcgtcctcccctgtaacctgctgcggatgatctggaatgctcagaaaatcttccacatcaacccacgccttccctccgacctgcaccccatcaaagtggtggagggagtcaaggaattgagcaagaagctggtgattgtgaatggggatgacccactaagtcgacaggcccaggaaaatgccacgctgctcttcaacatccacctgcggtccacgttgtgttcccgccgcatggcagaggagtttcggctcagtggggaggccttcgactggctgcttggggagattgagtccaagttcaaccaagccattgcgcatcccggggaaatggtgggggctctggctgcgcagtcccttggagaacctgccacccagatgaccttgaataccttccactatgctggtgtgtctgccaagaatgtgacgctgggtgtgccccgacttaaggagctcatcaacatttccaagaagccaaagactccttcgcttactgtcttcctgttgggccagtccgctcgagatgctgagagagccaaggatattctgtgccgtctggagcatacaacgttgaggaaggtgactgccaacacagccatctactatgaccccaacccccagagcacggtggtggcagaggatcaggaatgggtgaatgtctactatgaaatgcctgactttgatgtggcccgaatctccccctggctgttgcgggtggagctggatcggaagcacatgactgaccggaagctcaccatggagcagattgctgaaaagatcaatgctggttttggtgacgacttgaactgcatctttaatgatgacaatgcagagaagctggtgctccgtattcgcatcatgaacagcgatgagaacaagatgcaagaggaggaagaggtggtggacaagatggatgatgatgtcttcctgcgctgcatcgagtccaacatgctgacagatatgaccctgcagggcatcgagcagatcagcaaggtgtacatgcacttgccacagacagacaacaagaagaagatcatcatcacggaggatggggaattcaaggccctgcaggagtggatcctggagacggacggcgtgagcttgatgcgggtgctgagtgagaaggacgtggaccccgtacgcaccacgtccaatgacattgtggagatcttcacggtgctgggcattgaagccgtgcggaaggccctggagcgggagctgtaccacgtcatctcctttgatggctcctatgtcaattaccgacacttggctctcttgtgtgataccatgacctgtcgtggccacttgatggccatcacccgacacggagtcaaccgccaggacacaggaccactcatgaagtgttcctttgaggaaacggtggacgtgcttatggaagcagccgcacacggtgagagtgaccccatgaagggggtctctgagaatatcatgctgggccagctggctccggccggcactggctgctttgacctcctgcttgatgcagagaagtgcaagtatggcatggagatccccaccaatatccccggcctgggggctgctggacccaccggcatgttctttggttcagcacccagtcccatgggtggaatctctcctgccatgacaccttggaaccagggtgcaacccctgcctatggcgcctggtcccccagtgttgggagtggaatgaccccaggggcagccggtttctctcccagtgctgcgtcagatgccagcggcttcagcccaggttactcccctgcctggtctcccacaccgggctccccggggtccccaggtccctcaagcccctacatcccttcaccaggtggcgccatgtctcccagctactcgccaacgtcacctgcctacgagccccgctctcctgggggctacacaccccagagtccctcttattcccccacttcaccctcctactcccctacctctccatcctattctccaaccagtcccaactatagtcccacatcacccagctattcgccaacgtcacccagctactcaccgacctctcccagctactcacccacctctcccagctactcgcccacctctcccagctattcgcccacctctcccagctactcacccacttcccctagctattcgcccacttcccctagctactcgccaacgtctcccagctactcgccgacatctcccagctactcgccaacttcacccagctattctcccacttctcccagctactcacctacctctccaagctattcacccacctcccccagctactcacccacttccccaagttactcacccaccagcccgaactattctccaaccagtcccaattacaccccaacatcacccagctacagcccgacatcacccagctattcccctactagtcccaactacacacctaccagccctaactacagcccaacctctccaagctactctccaacatcacccagctattccccgacctcaccaagttactccccttccagcccacgatacacaccacagtctccaacctataccccaagctcacccagctacagccccagttcgcccagctacagcccaacctcacccaagtacaccccaaccagtccttcttatagtcccagctccccagagtataccccaacctctcccaagtactcacctaccagtcccaaatattcacccacctctcccaagtactcgcctaccagtcccacctattcacccaccaccccaaaatactccccaacatctcctacttattccccaacctctccagtctacaccccaacctctcccaagtactcacctactagccccacttactcgcccacttcccccaagtactcgcccaccagccccacctactcgcccacctcccccaaaggctcaacctactctcccacttcccctggttactcgcccaccagccccacctacagtctcacaagcccggctatcagcccggatgacagtgacgaggagaactgagggcacgtggggtgcggcagcgggctagggcccagggcagcttgcccgtgctgccgtgcagttcttgcctccctcacggggcgtcacccccagcccagctccgttgtacataaataccttgtgacagagctcccggtgaacttctggatcccgtttctgatgcagattcttgtcttgttctccacttgtgctgttagaactcactggcccagtggtgttctacctcctaccccacccaccccctgcctgtccccaaattgaagatccttccttgcctgtggcttgatgcggggcgggtaaagggtattttaacttaggggtagttcctgctgtgagtggttacagctgatcctcgggaagaacaaagctaaagctgccttttgtctgttattttatttttttgaagtttaaataaagtttactaattttgacc

SEQ ID NO: 14672 - protein, 1970 aa, Homo sapiens; identical to SEQ ID NO: 2966
  ref <308>: DATABASE ACCESSION NUMBER: SWISS-Prot / P24928
  ref <309>: DATABASE ENTRY DATE: 2001-10-16

SEQ ID NO: 14673 - DNA, 1070 bp, Rattus norvegicus; identical to SEQ ID NO: 13867
  ref <308>: DATABASE ACCESSION NUMBER: EMBL / U90215
  ref <309>: DATABASE ENTRY DATE: 2000-04-07

SEQ ID NO: 14674 - protein, 353 aa, Rattus norvegicus; identical to SEQ ID NO: 13868
  ref <308>: DATABASE ACCESSION NUMBER: SWISS-Prot / AAB49989
  ref <309>: DATABASE ENTRY DATE: 2002-10-01

SEQ ID NO: 14675 - DNA, 1894 bp, Homo sapiens; identical to SEQ ID NO: 13869
  ref <308>: DATABASE ACCESSION NUMBER: Refseq / NM_005668
  ref <309>: DATABASE ENTRY DATE: 2002-11-05

SEQ ID NO: 14676 - protein, 359 aa, Homo sapiens; identical to SEQ ID NO: 6076
  ref <308>: DATABASE ACCESSION NUMBER: Refseq / NP_005659
  ref <309>: DATABASE ENTRY DATE: 2002-11-05

SEQ ID NO: 14677 - DNA, 828 bp, Rattus norvegicus
  ref <308>: DATABASE ACCESSION NUMBER: EMBL / X52082
  ref <309>: DATABASE ENTRY DATE: 1993-09-12
atgccatcaaatatttgcaagttcttcctaacttggtggttaattcagcaggtgactgggctgacagggcctttgatgctagacacggctcccaatgcatttgatgaccagtatgagggctgtgtcaacaaaatggaggaaaaggcacccctgcttttaaaggaagactttaataagagtgagaaattaaaagttgcgtgggaagaggcaaagaaacgatggaacaacataaaacctagtatgagttatcccaaaggtttcaatgatttccatggaacggctttagttgcctacactgggagtatcggtgtagattttaacagagctgttagggaattcaaggaaaatcctggtcaattccactacaaggctttccattactacttaacaagagctcttcagcttttgagtaacggggattgtcattcagtctaccgaggcactaagaccaggtttcactatactggagctggctccgtgcgattcgggcagttcacgtcttcatcattgtctaagacagtagctcaatctccagagtttttcagtgatgatgggacgctattcatcatcaaaacctgcttgggggtttatatcaaagaattctctttctatcctgaccaagaggaggtgttaattccaggctatgaggtatatcagaaagtcaggacacaaggctacaacgaaattttcctggactccccgaagaggaagaagagcaactacaattgcttatacagcagcgcaggaaccagagagagctgtgtatccctgttccttgtggttctcaccagtcttctggtccagctgctttgtcttgctgagccgtag

SEQ ID NO: 14678 - protein, 275 aa, Rattus norvegicus
  ref <308>: DATABASE ACCESSION NUMBER: SWISS-Prot / P17982
  ref <309>: DATABASE ENTRY DATE: 2002-06-15
MPSNICKFFLTWWLIQQVTGLTGPLMLDTAPNAFDDQYEGCVNKMEEKAPLLLKEDFNKSEKLKVAWEEAKKRWNNIKPSMSYPKGFNDFHGTALVAYTGSIGVDFNRAVREFKENPGQFHYKAFHYYLTRALQLLSNGDCHSVYRGTKTRFHYTGAGSVRFGQFTSSSLSKTVAQSPEFFSDDGTLFIIKTCLGVYIKEFSFYPDQEEVLIPGYEVYQKVRTQGYNEIFLDSPKRKKSNYNCLYSSAGTRESCVSLFLVVLTSLLVQLLCLAEP

SEQ ID NO: 14679 - DNA, 1334 bp, Homo sapiens
  ref <308>: DATABASE ACCESSION NUMBER: EMBL / S74683
  ref <309>: DATABASE ENTRY DATE: 2000-03-04
ggccatggtggagatcagcagcagcttccccacccaggacaaggcctagatgaggaaactgagacccaaaaagagacagcaactggcccagggtcaccagcatgcagatgcctgctatgatgtctctgcttcttgtgtctgtgggcctcatggaagcacttcaggcccagagccaccccatcacacgacgagacctcttctctcaagagattcagctggacatggccctggcctcctttgatgaccagtacgctggctgtgctgctgccatgacagctgctctcccggatctcaaccacacggagttccaggccaaccaggtgtatgcagacagctggacactggcaagcagccaatggcaggagcgtcaggccaggtggccagagtggagtctcagccccacccgtccatccccgccacccctgggcttccgcgatgagcatggggtggccctcctggcctacacagccaacagccccctgcacaaggagttcaatgcagccgtgcgtgaggcgggccgctcccgggcccactacctccaccacttctccttcaagacactccatttcctgctgactgaggccctgcagctcctgggcagcggccagcgtccaccccggtgccaccaggtgttccgaggtgtgcacggcctgcgcttccggccagcagggccccgggccaccgtgaggctggggggctttgcttctgcctccctgaagcatgttgcagcccagcagtttggtgaggacaccttcttcggcatctggacctgccttggggcccctatcaagggctactccttcttccctggagaggaagaggtgctgatccccccctttgagaccttccaagtgatcaatgccagcagaccggcccagggccccgcccgcatctacctccgagccctgggcaagcacagcacctacaactgcgagtacatcaaagacaagaagtgcaagtctgggccttgccatctggataattcagccatgggtcagagccccctctctgcagtctggtctttgctgctgctgctctggttcctcgtggtgagggcctttccagatggtccaggcctcctttgatgcatgagacacgggacagcctcgcctgctgcctctgcccatcctgaggatgttggccatgtgtgcttcagtgtaaccaagattcctgtcaatcccatctgcagggaactctgggaccttctctggtagctgccagaccggctggtggagaaacaggagacaatctggggactgaaccttacccagggctgtaggagtgagactctgaataaagggttgggccggcaaaaaaaaaaaaaaaaaaaaaaa

SEQ ID NO: 14680 - protein, 327 aa, Homo sapiens
  ref <308>: DATABASE ACCESSION NUMBER: SWISS-Prot / P52961
  ref <309>: DATABASE ENTRY DATE: 2002-06-15
MQMPAMMSLLLVSVGLMEALQAQSHPITRRDLFSQEIQLDMALASFDDQYAGCAAAMTAALPDLNHTEFQANQVYADSWTLASSQWQERQARWPEWSLSPTRPSPPPLGFRDEHGVALLAYTANSPLHKEFNAAVREAGRSRAHYLHHFSFKTLHFLLTEALQLLGSGQRPPRCHQVFRGVHGLRFRPAGPRATVRLGGFASASLKHVAAQQFGEDTFFGIWTCLGAPIKGYSFFPGEEEVLIPPFETFQVINASRPAQGPARIYLRALGKHSTYNCEYIKDKKCKSGPCHLDNSAMGQSPLSAVWSLLLLLWFLVVRAFPDGPGLL

SEQ ID NO: 14681 - DNA, 3220 bp, Rattus norvegicus
  ref <308>: DATABASE ACCESSION NUMBER: EMBL / X52952
  ref <309>: DATABASE ENTRY DATE: 1993-09-12
aattccaggaacttgtttgctgtgaagtctagaatctgtcttgaagcaagcttgctctgtgacctaacttgcctgggaaaggaagggacggtagaagtcagtgtgttgttaaggagtcttaacttgctgtttaaatgaaatacagtgtcagattgctcccttctgatggacttaggaggtacgagttctgccttctatccgagattgtatttggatcaaagacattaaaattacagatgttaattcttatgaaggttgcatctaataaccctgccaagtagttcaacaagctgtctgctgtttgtactgcaactcttgcagccatagctgctggactgatttaatgcagctggagactagcacgaacaatcattatagcctgaaaagtgtgcaccaagttcactgtacttttgcttttctcttcagtctaaggacccaattaatgatcgtcagaaggtccttgaaatgttttttcattgtattcatgattgccaagaattagcttggaaggagaggtgagctttggggcaggccagtactgtttaacaggtgagaggttgttttgctaaggattcactttagctgtgagagcgcatcgtttcatctgagactgccggacttcatctgcacccgaaccaacccctgacttattttttaaaaaagaaacaccttgtggagtagtgatagcagcaagacgtgagagcacagttgtggctggttttgagaatacaagaaaaagggaaatgggatgaaggcggaaaccttcagccatgcttccaaacttccctgggtgttcctggtcatttctctctagcgtctcttgtgactgtcccatctgagggtgtaatgccttcgcctctcatcctgtgtcgctacctccctcgcgagctgtcgccaacggtggactcgcggtcctgcagcagccccttggtggcctcgagggcggggaagttcctgggggccactcctcctcgggccccgcgggtgtcacgccggctggcctggtgcttcatagactggggacaggtatgcctgctgcataggctgggttctggagggtttggctcggtgtacaaagccacttaccacggtgttcctgtggccatcaagcaagtgaacaagtgcaccagaaccctacgtgcatcccaagcgaatttctgggctgaactgaacattgcaaggctgcaccacgacaacataatccgggttgtggctgccagcacgcgcacgccggaaggttccaacagccttggtaccataatcatggagtttgggggcaatgtgactctacaccaagtcatctacggtgccacccgctccccagagcctctcagctgcagagagcaactgagtttgggaaagtgcctcaagtattccctagatattgttaacggcctgctttttctccactcacaaagcattttgcacttggacctgaagccagcgaacattttgatcagtgagaaggacgtttgtaagataagtgacttcggctgctcccagaagcttcaggatctgcggtgccggccgtcccttcaccacatcgggggcacgtacacgcaccaagctccggagctcctgaaaggagagatcgccacgcccaaagccgacatctactcttttggcatcaccctgtggcagatgaccaccagggaggtgccttactccggcgagcctcagtacgtgcagtacgcagtggtagcctacaatctgcgccctcactggcaggcggtgttcaccgcctccctgactgggaagacgctgcagaacaatgtccagagctgctgggaggcccgcgccctgcagaggccgggtgcagaactgctccagaaggacctgaaggctttccgaggggcactgggctgactccatcgagccgatgtgcagataagcttttcgtttctgtttatttttaaataagtaaggatgggcttttagggcatatttttagaaaataaagttactacaaacttcacctgaagtgcctttcctaagactaacgagggtacgagggtacagatatcatgggcaccactcacggttgttaaacaacctgagccctttgtgtgtcacctttctgggtctactgtatcatttccgtagtaaggtttgttccgaatgaaaagagaaagggggtgggatctcaggggccatactcaggaactgaaggagaaagtttattgcggatacgacgaggagacataggacatagtcatagacatacggacatctgctgagaaagcccagagcggacatgttcctgagccatgtgagcgagcgtacgtaggagcaggaagggggaaggaagcagaagtaggtacagcagctggaagattcaaaaccgggagggggacgctaaaatggattatataagaaaggacagctgggggaagggacgccagtccctgggttggagaagtttagggcagagggtggggtgccagtctggagcactctgtagtagacagggactgagggatgcagggagaacctggcagaggtccacttcgatatgttaaataggtacctcagcccttcgtcctgggtttgaaaactaacagtttactgataaagaatatttttccaaaaaagaataccactatagacatgccacatttgccccctgttaattctcacaggccacatctcccccacacacacagacacacatctaaattcaagctgcagttgaatttactgcaacaaaacagaaaaccaatgcgttttaaaagagcagttgttagcagcgaaatggagcatagtttaatacagcacacaggagtagaggcagttggagctctgatctcttgagttcaaggccaacctgatctacaaggtgagttcaagatacaggttatatcgatagcctgggtacaaagagaaacatgtgaagaaaaacacaaaacaaaccaaaaaatggttgctttcctttccagtccataagggaaggtcatttgctaatcgctttcacataaacaaattgaattattttttcaaacaatattctaaatgacttgtaatagcctaccatttcgaaccattgtcatgagcagaaaagttgcaaaaacattctacactaggtttcgttttgctcctcagatttgagcccaaaagcagatggtaaaaataaagtgctgagggggcaaatcagagcccaataaagagtgagggctgagtccaatgtaaaaggaaagaccagtgaagtgggtcttctctagaa

SEQ ID NO: 14682 - protein, 339 aa, Rattus norvegicus
  ref <308>: DATABASE ACCESSION NUMBER: SWISS-Prot / P00539
  ref <309>: DATABASE ENTRY DATE: 2001-10-16
MPSPLILCRYLPRELSPTVDSRSCSSPLVASRAGKFLGATPPRAPRLSRRLAWCFIDWGQVCLLHRLGSGGFGSVYKATYHGVPVAIKQVNKCTRTLRASQRNFWAELNIARLHHDNIIRVVAASTRTPEGSNSLGTIIMEFGGNVTLHQVIYGATRSPEPLSCREQLSLGKCLKYSLDIVNGLLFLHSQSILHLDLKPANILISEKDVCKISDFGCSQKLQDLRCRPSLHHIGGTYTHQAPELLKGEIATPKADIYSFGITLWQMTTREVPYSGEPQYVQYAVVAYNLRPHWQAVFTASLTGKTLQNNVQSCWEARALQRPGAELLQKDLKAFRGALG

SEQ ID NO: 14683 - DNA, 1303 bp, Homo sapiens
  ref <308>: DATABASE ACCESSION NUMBER: EMBL / J00119
  ref <309>: DATABASE ENTRY DATE: 2000-03-04
cggaagggaaatgctttcatctgaaagggatagctgtgcttcattccggtttctccctccatctgataaaaactcttgctgagtgacagcacagatgtagctcatttggaacaagtgaaggaaaaggagaaaagggatgaggtggagcgaaggagtagtcagtcatgtttccaaagtcccgcggtttcccctagtctcttcattcactccagcggccctggtgtccccctgcaaagtgcgatgccctcgcccctggccctacgcccctacctccggagcgagttttccccatcggtggacgcgcggccctgcagcagtccctcagagctacctgcgaagctgcttctgggggccactcttcctcgggccccgcggctgccgcgccggctggcctggtgctccattgactgggagcaggtgtgcttgctgcagaggctgggagctggagggtttggctcggtgtacaaggcgacttaccgcggtgttcctgtggccataaagcaagtgaacaagtgcaccaagaaccgactagcatctcggcggagtttctgggctgagctcaacgtagcaaggctgcgccacgataacatcgtgcgcgtggtggctgccagcacgcgcacgcccgcagggtccaatagcctagggaccatcatcatggagttcggtggcaacgtcactttacaccaagtcatctatggcgccgccggccaccctgagggggacgcaggggagcctcactgccgcactggaggacagttaagtttgggaaagtgtctcaagtactcactagatgttgtgaacggcctgctcttcctccactcgcaaagcattgtgcacttggacctgaagcccgcgaacatcttgatcagtgagcaggatgtctgtaaaattagtgacttcggttgctctgagaagttggaagatctgctgtgcttccagacaccctcttaccctctaggaggcacatacacccaccgcgccccggagctcctgaaaggagagggcgtgacgcctaaagccgacatttattcctttgccatcactctctggcaaatgactaccaagcaggcgccgtattcgggggagcggcagcacatactgtacgcggtggtggcctacgacctgcgcccgtccctctccgctgccgtcttcgaggactcgctccccgggcagcgccttggggacgtcatccagcgctgctggagacccagcgcggcgcagaggccgagcgcgcggctgcttttggtggatctcacctctttgaaagctgaactcggctgactgaaaacttggtcaagataag

SEQ ID NO: 14684 - protein, 346 aa, Homo sapiens
  ref <308>: DATABASE ACCESSION NUMBER: SWISS-Prot / TVHUMS
  ref <309>: DATABASE ENTRY DATE: 2001-10-16
MPSPLALRPYLRSEFSPSVDARPCSSPSELPAKLLLGATLPRAPRLPRRLAWCSIDWEQVCLLQRLGAGGFGSVYKATYRGVPVAIKQVNKCTKNRLASRRSFWAELNVARLRHDNIVRVVAASTRTPAGSNSLGTIIMEFGGNVTLHQVIYGAAGHPEGDAGEPHCRTGGQLSLGKCLKYSLDVVNGLLFLHSQSIVHLDLKPANILISEQDVCKISDFGCSEKLEDLLCFQTPSYPLGGTYTHRAPELLKGEGVTPKADIYSFAITLWQMTTKQAPYSGERQHILYAVVAYDLRPSLSAAVFEDSLPGQRLGDVIQRCWRPSAAQRPSARLLLVDLTSLKAELG

SEQ ID NO: 14685 - DNA, 1456 bp, Rattus norvegicus
  ref <308>: DATABASE ACCESSION NUMBER: EMBL / X63446
  ref <309>: DATABASE ENTRY DATE: 1992-03-20
gtccatctcccagggcctctctggagcagccatgaagtccctggtcctgctcctttgttttgctcagctctggagctgccaatcagctccacaaggtgcagggctgggttttcgagaattggcttgtgatgacccggaaacagagcatgtagctttgatagccgtggactacctcaataaacatcttcttcagggattcaggcagatcttgaatcagattgacaaagtcaaggtgtggtctcggcggcccttcggagaggtgtatgagttggaaattgacacgctggagacaacctgccacgctctggacccaacccccttagcaaattgttctgtgaggcaacaggccgagcatgcggtggagggagactgtgacttccacatcctgaaacaagatggccagttcagggtgctacacgcccagtgtcattccacaccagactctgcagaggacgttcggaagttttgcccacgatgcccaatcctgatccggttcaatgacaccaacgtggtccacactgtcaaaactgccctggctgccttcaatgcacagaataatggaacctattttaaactggtggagatttcccgagctcaaaatgtgcctttcccggtgtctactctcgtggagtttgtgatagctgcgactgactgtactggtcaggaggtcacagatccagccaaatgcaacctgctggcagaaaagcaatatggcttctgcaaggcgactctcatccacagacttggtggggaagaggtttcagtggcctgcaagttattccagacacagccccagccagccaatgccaaccctgcaggtcctgcacccacagtgggccaagctgcgcctgtagccccaccagctggcccacctgaatccgtggtggtaggacccgtggcagttcctctaggacttccagaccaccgaacccaccatgacctacggcatgccttctctcctgtggcttctgtggagtcggcctcaggagaagttcttcactcacctaaggtgggccagcctggtgacgctggtgctgctggcccagtggcccccctgtgcccagggagagtcagatacttcaagatctaggcttgactcagggaagtaaggttttggcaggcaggacatagccaccactgaagtagagggcttgtccactgaccaagcaagtaccacatcatagcttgaattcaggtctcttcattccccagagaaaaggggcagagaggtgatggttaaatttgttgaaagccagcagcagcaacactagcacttgtggggtgacagactactgtcatttgtttctttgccttctcactgacctcatacaaagcagttgcaagcgcgactgtgaaaggtgctctcaccaaacttcaatctacccataaataaaagtacccgaaggagctttcttaaacaagaaggttctgagccgagtgtggttgtgaaaaaaaa

SEQ ID NO: 14686 - protein, 352 aa, Rattus norvegicus
  ref <308>: DATABASE ACCESSION NUMBER: PIR / A32827
  ref <309>: DATABASE ENTRY DATE: 1999-10-15
MKSLVLLLCFAQLWSCQSAPQGAGLGFRELACDDPETEHVALIAVDYLNKHLLQGFRQILNQIDKVKVWSRRPFGEVYELEIDTLETTCHALDPTPLANCSVRQQAEHAVEGDCDFHILKQDGQFRVLHAQCHSTPDSAEDVRKFCPRCPILIRFNDTNVVHTVKTALAAFNAQNNGTYFKLVEISRAQNVPFPVSTLVEFVIAATDCTGQEVTDPAKCNLLAEKQYGFCKATLIHRLGGEEVSVACKLFQTQPQPANANPAGPAPTVGQAAPVAPPAGPPESVVVGPVAVPLGLPDHRTHHDLRHAFSPVASVESASGEVLHSPKVGQPGDAGAAGPVAPLCPGRVRYFKI

SEQ ID NO: 14687 - DNA, 1538 bp, Homo sapiens
  ref <308>: DATABASE ACCESSION NUMBER: EMBL / M16961
  ref <309>: DATABASE ENTRY DATE: 2000-03-04
cctccaaccacctgcacgcctgcctgccagggcctctctggggcagccatgaagtccctcgtcctgctcctttgtcttgctcagctctggggctgccactcagccccacatggcccagggctgatttatagacaaccgaactgcgatgatccagaaactgaggaagcagctctggtggctatagactacatcaatcaaaaccttccttggggatacaaacacaccttgaaccagattgatgaagtaaaggtgtggcctcagcagccctccggagagctgtttgagattgaaatagacaccctggaaaccacctgccatgtgctggaccccacccctgtggcaagatgcagcgtgaggcagctgaaggagcatgctgtcgaaggagactgtgatttccagctgttgaaactagatggcaagttttccgtggtatacgcaaaatgtgattccagtccagactcagccgaggacgtgcgcaaggtgtgccaagactgccccctgctggccccgctgaacgacaccagggtggtgcacgccgcgaaagctgccctggccgccttcaacgctcagaacaacggctccaattttcagctggaggaaatttcccgggctcagcttgtgcccctcccaccttctacctatgtggagtttacagtgtctggcactgactgtgttgctaaagaggccacagaggcagccaagtgtaacctgctggcagaaaagcaatatggcttttgtaaggcaacactcagtgagaagcttggtggggcagaggttgcagtgacctgcacggtgttccaaacacagcccgtgacctcacagccccaaccagaaggtgccaatgaagcagtccccacccccgtggtggacccagatgcacctccgtcccctccacttggcgcacctggactccctccagctggctcacccccagactcccatgtgttactggcagctcctccaggacaccagttgcaccgggcgcactacgacctgcgccacaccttcatgggtgtggtctcattggggtcaccctcaggagaagtgtcgcacccccggaaaacacgcacagtggtgcagcctagtgttggtgctgctgctgggccagtggttcctccatgtccggggaggatcagacacttcaaggtctaggctagacatggcagagatgaggaggtttggcacagaaaacatagccaccattttgtccaagcctgggcatgggtggggggccttgtctgctggccacgcaagtgtcacatgcgatctacattaatatcaagtcttgactccctacttcccgtcattcctcacaggacagaagcagagtgggtggtggttatgtttgacagaaggcattaggttgacaacttgtcatgattttgacggtaagccaccatgattgtgttctctgcctctggttgaccttacaaaaaccattggaactgtgactttgaaaggtgctcttgctaagcttatatgtgcctgttaatgaaagtgcctgaaagaccttccttaataaagaaggttctaagctg

SEQ ID NO: 14688 - protein, 367 aa, Homo sapiens
  ref <308>: DATABASE ACCESSION NUMBER: SWISS-Prot / WOHU
  ref <309>: DATABASE ENTRY DATE: 2002-06-15
MKSLVLLLCLAQLWGCHSAPHGPGLIYRQPNCDDPETEEAALVAIDYINQNLPWGYKHTLNQIDEVKVWPQQPSGELFEIEIDTLETTCHVLDPTPVARCSVRQLKEHAVEGDCDFQLLKLDGKFSVVYAKCDSSPDSAEDVRKVCQDCPLLAPLNDTRVVHAAKAALAAFNAQNNGSNFQLEEISRAQLVPLPPSTYVEFTVSGTDCVAKEATEAAKCNLLAEKQYGFCKATLSEKLGGAEVAVTCTVFQTQPVTSQPQPEGANEAVPTPVVDPDAPPSPPLGAPGLPPAGSPPDSHVLLAAPPGHQLHRAHYDLRHTFMGVVSLGSPSGEVSHPRKTRTVVQPSVGAAAGPVVPPCPGRIRHFKV

SEQ ID NO: 14689 - DNA, 2021 bp, Rattus norvegicus; identical to SEQ ID NO: 13972
  ref <308>: DATABASE ACCESSION NUMBER: EMBL / X66842
  ref <309>: DATABASE ENTRY DATE: 1992-08-20

SEQ ID NO: 14690 - protein, 479 aa, Rattus norvegicus; identical to SEQ ID NO: 13973
  ref <308>: DATABASE ACCESSION NUMBER: SWISS-Prot / P30994
  ref <309>: DATABASE ENTRY DATE: 1995-11-01

SEQ ID NO: 14691 - DNA, 1790 bp, Homo sapiens; identical to SEQ ID NO: 13974
  ref <308>: DATABASE ACCESSION NUMBER: EMBL / X77307
  ref <309>: DATABASE ENTRY DATE: 1994-05-02

SEQ ID NO: 14692 - protein, 481 aa, Homo sapiens; identical to SEQ ID NO: 13975
  ref <308>: DATABASE ACCESSION NUMBER: SWISS-Prot / P41595
  ref <309>: DATABASE ENTRY DATE: 2002-06-15

SEQ ID NO: 14693 - DNA, 2093 bp, Rattus norvegicus
  ref <308>: DATABASE ACCESSION NUMBER: EMBL / X74549
  ref <309>: DATABASE ENTRY DATE: 1996-08-20
ctctggtctcatctctgccacgccactgctcagaggcacagagtgagcaacagtttggtagcgctgagtccatccactggaaattctcctcctgtctcagcggctttagctctgcagaaatgaagcatccagcctacactctccttctctctctcatcatgtctatgtgtgctgggagcaaaggccttgctgagcagctaactaaggaaaacctgaccgtgtccctcctgcctcctaacttccacaaagagaacacagtcaccaatgactggattccagaaggagaggaagatgacgactacctggacctggagaagctgctcagtgaagatgacgactacatctatgttgtcgatgcagtttccccaacagactcagaatcaagtgctggcaacatcctgcagcttttccaaggcaaaagccggatccagcgccttaacatcctcaatgcaaagtttgccttcaacctttaccgagtcctgaaggaccaggctacctcttctgataacattttcatagcacccgttggcatttccactgccatggggatgatctccttaggtttgaggggagagacccatgaggaagtacactcagttctacacttcaaagactttgtcaatgctagcagcaagtacgaggtgacaaccattcacaacctctttcgaaagctgacccatcgcctattcagaaggaattttgggtacacacttcagtcagttaatgacctttatattcagaagcagtttcccatacgggaggacttcaaagctgccatgagagagttttactttgctgaggcccaggaggctgacttctcagatcctgccttcatatcaaaggcaaacagccacattctgaagctcaccaagggcctcataaaagaagctttggagaatacagactctgctactcagatgatgattctgaactgcatctacttcaaaggagcttggatgaataaattcccagtagaaatgacgcataaccacaacttccggctgaatgagagagaagtagtaaaagtctccatgatgcaaactaaagggaacttccttgcggcaaatgaccaggagctagactgtgacattctgcagctggagtatgtagggggcatcagcatgctaattgtaattccacggaagctgtcgggaatgaagactcttgaagcacagcttacaccccaggtagtggagagatggcaaaaaagcatgacaaacagaacccgagaggtacttctgcccaagtttaagcttgagaagaattacaacctggtggaggtcctcaagtccatgggaatcacaaagctcttcaacaagaatggcaatatgtcaggcatctcagaccagaggatcatcattgatctgttcaagcaccagagtaccatcacagtgaatgaagagggtacccaagctgcagctgtaactacagtggggtttatgccgctgtctacccaagtcagattcactgttgaccgtcccttcctgttcctagtgtatgagcaccgaaccagctgtctgctgttcatgggaagagtggccaaccctgccaagtcttaatggtgctggtctgggcacctgatgtagtttggggacactctgtaatcctgttttcattctaagaggacagagatattttgatattgataatctatgtagtttgagataataatctaacagtaaacagtgtcataagtgcacagatgttaatgcaactaatggtcgtgccagctattccctagaggtcctagacacagactgcctcagcgccaacgcctctgtcactgagaatgggcagagtggagctgacactttctcctcagttagccgtaccagtcaaggtgtctcctcagccaggcccctccatatggatggtactgaggaactctcacccttccagggaggatgtccaaggagcaccattcttgcctagtggaaaagaaacctcaacatgtctgagacatttggacttaattcaaggctgaaccttttaaattcatgtaaatatcatctgttctgctttgtgtcaatagggctaccatagcctattctagagacaaataaacaaccatatttactaagcaaaaaaaaaaa

SEQ ID NO: 14694 - protein, 201 aa, Rattus norvegicus
  misc_feature (1)..(201): Xaa=Unknown amino acid
  ref <308>: DATABASE ACCESSION NUMBER: PIR / S41066
  ref <309>: DATABASE ENTRY DATE: 1999-06-18
MSAARLSAVAQSTVYAFSARPLAGGEPVSLGSLRGKVLLIENVASLXGTTTRDYTEMNDLQKRLGPRGLVVLGFPCNQFGHQENGKNEEILNSLKYVRPGGGFEPNFTLFEKCEVNGEKAHPLFTFLRNALPAPSDDPTALMTDPKYIIWSPVCRNDISWNFEKFLVGPDGVPVRRYSRRFRTIDIEPDIEALLSKQPSNP

SEQ ID NO: 14695 - DNA, 2081 bp, Homo sapiens
  ref <308>: DATABASE ACCESSION NUMBER: EMBL / X03498
  ref <309>: DATABASE ENTRY DATE: 1986-07-02
gtgggagcaaaggcccgctggatcagctagagaaaggaggggaaactgctcagtctgcagatccccagtgggagcagttaaataacaaaaacctgagcatgcctcttctccctgccgacttccacaaggaaaacaccgtcaccaacgactggattccagagggggaggaggacgacgactatctggacctggagaagatattcagtgaagacgacgactacatcgacatcgtcgacagtctgtcagtttccccgacagactctgatgtgagtgctgggaacatcctccagctttttcatggcaagagccggatccagcgtcttaacatcctcaacgccaagttcgctttcaacctctaccgagtgctgaaagaccaggtcaacactttcgataacatcttcatagcacccgttggcatttctactgcgatgggtatgatttccttaggtctgaagggagagacccatgaacaagtgcactcgattttgcattttaaagactttgttaatgccagcagcaagtatgaaatcacgaccattcataatctcttccgtaagctgactcatcgcctcttcaggaggaattttgggtacacactgcggtcagtcaatgacctttatatccagaagcagtttccaatcctgcttgacttcaaaactaaagtaagagagtattactttgctgaggcccagatagctgacttctcagaccctgccttcatatcaaaaaccaacaaccacatcatgaagctcaccaagggcctcataaaagatgctctggagaatatagaccctgctacccagatgatgattctcaactgcatctacttcaaaggatcctgggtgaataaattcccagtggaaatgacacacaaccacaacttccggctgaatgagagagaggtagttaaggtttccatgatgcagaccaaggggaacttcctcgcagcaaatgaccaggagctggactgcgacatcctccagctggaatacgtggggggcatcagcatgctaattgtggtcccacacaagatgtctgggatgaagaccctcgaagcgcaactgacaccccgggtggtggagagatggcaaaaaagcatgacaaacagaactcgagaagtgcttctgccgaaattcaagctggagaagaactacaatctagtggagtccctgaagttgatggggatcaggatgctgtttgacaaaaatggcaacatggcaggcatctcagaccaaaggatcgccatcgacctgttcaagcaccaaggcacgatcacagtgaacgaggaaggcacccaagccaccactgtgaccacggtggggttcatgccgctgtccacccaagtccgcttcactgtcgaccgcccctttcttttcctcatctacgagcaccgcaccagctgcctgctcttcatgggaagagtggccaaccccagcaggtcctagaggtggaggtctaggtgtctgaagtgccttgggggcaccctcattttgtttccattccaacaacgagaacagagatgttctggcatcatttacgtagtttacgctaccaatctgaattcgaggcccatatgagaggagcttagaaacgaccaagaagagaggcttgttggaatcaattctgcacaatagcccatgctgtaagctcatagaagtcactgtaactgtagtgtgtctgctgttacctagagggtctcacctccccactcttcacagcaaacctgagcagcgcgtcctaagcacctcccgctccggtgaccccatccttgcacacctgactctgtcactcaagcctttctccaccaggcccctcatctgaataccaagcacagaaatgagtggtgtgactaattccttacctctcccaaggagggtacacaactagcaccattcttgatgtccagggaagaagccacctcaagacatatgaggggtgccctgggctaatgttagggcttaattttctcaaagcctgacctttcaaatccatgatgaatgccatcagtccctcctgctgttgcctccctgtgacctggaggacagtgtgtgccatgtctcccatactagagataaataaat

SEQ ID NO: 14696 - protein, 499 aa, Homo sapiens
  ref <308>: DATABASE ACCESSION NUMBER: SWISS-Prot / P05546
  ref <309>: DATABASE ENTRY DATE: 2002-06-15
MKHSLNALLIFLIITSAWGGSKGPLDQLEKGGETAQSADPQWEQLNNKNLSMPLLPADFHKENTVTNDWIPEGEEDDDYLDLEKIFSEDDDYIDIVDSLSVSPTDSDVSAGNILQLFHGKSRIQRLNILNAKFAFNLYRVLKDQVNTFDNIFIAPVGISTAMGMISLGLKGETHEQVHSILHFKDFVNASSKYEITTIHNLFRKLTHRLFRRNFGYTLRSVNDLYIQKQFPILLDFKTKVREYYFAEAQIADFSDPAFISKTNNHIMKLTKGLIKDALENIDPATQMMILNCIYFKGSWVNKFPVEMTHNHNFRLNEREVVKVSMMQTKGNFLAANDQELDCDILQLEYVGGISMLIVVPHKMSGMKTLEAQLTPRVVERWQKSMTNRTREVLLPKFKLEKNYNLVESLKLMGIRMLFDKNGNMAGISDQRIAIDLFKHQGTITVNEEGTQATTVTTVGFMPLSTQVRFTVDRPFLFLIYEHRTSCLLFMGRVANPSRS

SEQ ID NO: 14697 - DNA, 3913 bp, Rattus norvegicus; identical to SEQ ID NO: 11316
  ref <308>: DATABASE ACCESSION NUMBER: EMBL / X77209
  ref <309>: DATABASE ENTRY DATE: 1997-01-30

SEQ ID NO: 14698 - protein, 641 aa, Rattus norvegicus; identical to SEQ ID NO: 11317
  ref <308>: DATABASE ACCESSION NUMBER: SWISS-Prot / P55063
  ref <309>: DATABASE ENTRY DATE: 1996-10-01

SEQ ID NO: 14699 - DNA, 31737 bp, Homo sapiens; identical to SEQ ID NO: 13986
  ref <308>: DATABASE ACCESSION NUMBER: EMBL / AF134726
  ref <309>: DATABASE ENTRY DATE: 1999-03-29

SEQ ID NO: 14700 - DNA, 472 bp, Rattus norvegicus
  ref <308>: DATABASE ACCESSION NUMBER: EMBL / X89701
  ref <309>: DATABASE ENTRY DATE: 1997-04-07
catatgccaccctttacagtacacaacaaagatgacccatcagctctgtgcccttcttgtcgtggggtcatgggtggtagccaatctgaactgtctgttacacatactgctcatggctcccctctcgttctgtgcagacaacatcatcccccacttcttctgcgatgcaactcccctcctgaaactctcctgctcagacacacatctcaatgaactgatgattcttacagagggagctgtgatcattgtcaccccatttgtctgtatcctgatctcctacatccacgtcacttgtgctgtcttgagagtctcatcccccaggggaggatggaaagccttctccacccgtggctcccacccggctgtggtctgcctcttctatggcaccatcattgctgagtatttctcctcttcatcccctcactcagctgggagggacatggcaggtgccatgatgtacacagtggtgacc

SEQ ID NO: 14701 - protein, 157 aa, Rattus norvegicus
  ref <308>: DATABASE ACCESSION NUMBER: SWISS-Prot / CAA61848
  ref <309>: DATABASE ENTRY DATE: 2001-12-01
ICHPLQYTTKMTHQLCALLVVGSWVVANLNCLLHILLMAPLSFCADNIIPHFFCDATPLLKLSCSDTHLNELMILTEGAVIIVTPFVCILISYIHVTCAVLRVSSPRGGWKAFSTRGSHPAVVCLFYGTIIAEYFSSSSPHSAGRDMAGAMMYTVVT

SEQ ID NO: 14702 - DNA, 999 bp, Homo sapiens
  ref <308>: DATABASE ACCESSION NUMBER: Refseq / XM_036497
  ref <309>: DATABASE ENTRY DATE: 2002-08-01
cttaaccacccatgtgtatgtttctgaattcactgtcttctatgcagctgggtccagacatatgagagggacaaaccagtgagtgtctccgagttcctcctcttgggactctccaggcagccccagcagcagcatctcctctttgtgttcttcctcagcatgtacctggccactgtcctggggaacctgctcatcatcctggccataagcatagactcccgcctgcacacccccatgtacttcttcctcagcaacatgtcctttgtggacaactgcttctccaccaccgtccccaagatgctggccaatcacatactcaggactcaaaccatctccttctctggctgtctcatgcagatgtattttatcagtgagcttgctgacatggacaatttcctcctggctgtgatggcctatgaccgctttgtcgccgtgtgccgccccttacattacacagcaaagatgacccatcagctctgtgccctgctggtcactggatcatgggtggttgccaactcgaatgctctgctgcacaccctgctgatggctcgactctcattctgtgcagacaacaccatcccccacatcttctgcgatgtgactcccctcctgaaactctcctgttcagacacacacctcagtgaagtgatgattcttactgaggctgccctagtcacgatcaccccatttctttgcctcctggcttcctatatgcacatcacctgcgttgtcctgagggtcccatccacaaagggaagatggaaagccttctccacctgtggctcccacctggctgtggttctcctcttctatggcaccatcatgtctccatatttcagaacttcatcctcccactcagctcagagagatatagcagctgctgtgaggttcacagtggtgactcccgtgatgaatcctttgatctacagcctgaggaacaaggacataaaaggggctcttgtaaaagtggttgctgtgaaatttttttctgttcaataa

SEQ ID NO: 14703 - protein, 279 aa, Homo sapiens [sequence omitted]

SEQ ID NO: 14704 - DNA, 2189 bp, Rattus norvegicus
  ref <308>: DATABASE ACCESSION NUMBER: Refseq / NM_021741
  ref <309>: DATABASE ENTRY DATE: 2000-11-08
ggccatcaagagctccttccagccgtggctcggggagtcagttctacggtccggaggtgctgatgcacacagagtttgtagaaatcgagttccttcagtaagatccaaagacataagcttccagttatgtaaggctcttaaaggctgcttaagtgtatcaggcgtgctcagaaatctggagctaaatgggctgattctgagagagagagatttgactagtctaacaaagggattgagtaaatcagcctctttggtgcacctgtctcttgcaaactgtccagttggagatggaggtttagaaattatttgtcaaggtataaagaactccgtcactctcaagaccgtcaacttcacaggatgcaatctgacgtggcaaggagccagtcatatggccaagatcttaaagtatcaaaccatgagaagacatgaagagacctgggctgagagtcttcgctacaggaggccggatcttgactgcatggccggcttaaggcgcatcacactgaattgcaacacactcattggtgaccagggtgcaagtgcttttgcagactctctcagtgaggatttatggcttcgggcacttgacctgcagcagtgcggccttaccagtgaaggggcgaaggctttactggaggccttggaaaccaacagaaccctggtcgttctggatataaggaaaaacccacttattgatcattctatgatgaaagcagttatcagaaaggttctccagaacggaaggagtgcaacttcagagtaccagtgggtaacgtccccgtcactgaaggaactgcccaaaaccactaagcagaaaaagaaaacgatcgtcctaggaagcagtcgaaaaggaaaagctactattcgagttggtttagctacaaagaaacctgtgagtaatgggagaaaacatgggctcagtaaagactcctatgctcccgaccctctgcctccaggcgcgtctggtttcttgccctggcgcacggcagaacgtgcaagaagaaacaggagttttccattaatcaaaactcatgatctgtctaatcacctgcagcaatcagatttccctgtgactgtgacagtagaaagtccttcatcctcagaaactgacgagtctgaggattcttcagaaagtgtccatgaagtgcctcagaaaaccagcataagacaagaaacattacaggagaagctggaggagtgcctaaagcagctaaaggaggagagagtgacccgcctcaaaactgacaagcgcatcagtgagctggaacatgaaaatgcccagctaagaaatataaatttctccctgtctgaagcccttcaagcacagtcattgacgagcatgatcctggacgatgaaggagtcttgggcagcatcgagaattcttttcagaagttccacgcctttttggatctccttaaagatgctgggctcgggcagcttgccactatggctggtatagatcagtcagatttccacctgttaggtcgtccccagatgagttctacggttaacacacctgtggaagaacagaaaggacttgaagatgaaaatctggatctgaagcagactgctgtaggacaaatgcaggacatcggtgttccagcttccacacaagaggcagcaggatcttctcgagaccacctgggggttgtagccctggagcagcaggagggctctgcagtgggattcattgctataacaggctctccttcagcagatggcatttcaggaggcagaagtctagaagaggtggtgttgtcaaagcacagcaggtcttcttcaggcaaagggagcacagcaagcgagccctccagaaggcagtctgctgagagacactccaggaaggacctgcattccgactccgactcccctgtgaactcaaaaggcaaaggacctggggaaaagaggtctttgcttaatgagccaattaaaagtgaatctttgaaaaaatgtgtttctatcaagaaagaaaatagaatagtgactgtatcatcaaagagtatcaaaagtaaacccaatctgctagaacattctgaaagtgatactattgggtctgattttgaatttcaagagcatgaccattcgtcagcacacctgacctgacataggtctaaccttttgaaattatgatttttgccttaaaattttaataaattttcttatgtttttaaaaaaaaaaaaaaaaaaa

SEQ ID NO: 14705 - protein, 571 aa, Rattus norvegicus
  ref <308>: DATABASE ACCESSION NUMBER: Refseq / NP_068509
  ref <309>: DATABASE ENTRY DATE: 2000-11-08
MAKILKYQTMRRHEETWAESLRYRRPDLDCMAGLRRITLNCNTLIGDQGASAFADSLSEDLWLRALDLQQCGLTSEGAKALLEALETNRTLVVLDIRKNPLIDHSMMKAVIRKVLQNGRSATSEYQWVTSPSLKELPKTTKQKKKTIVLGSSRKGKATIRVGLATKKPVSNGRKHGLSKDSYAPDPLPPGASGFLPWRTAERARRNRSFPLIKTHDLSNHLQQSDFPVTVTVESPSSSETDESEDSSESVHEVPQKTSIRQETLQEKLEECLKQLKEERVTRLKTDKRISELEHENAQLRNINFSLSEALQAQSLTSMILDDEGVLGSIENSFQKFHAFLDLLKDAGLGQLATMAGIDQSDFHLLGRPQMSSTVNTPVEEQKGLEDENLDLKQTAVGQMQDIGVPASTQEAAGSSRDHLGVVALEQQEGSAVGFIAITGSPSADGISGGRSLEEVVLSKHSRSSSGKGSTASEPSRRQSAERHSRKDLHSDSDSPVNSKGKGPGEKRSLLNEPIKSESLKKCVSIKKENRIVTVSSKSIKSKPNLLEHSESDTIGSDFEFQEHDHSSAHLT

SEQ ID NO: 14706 - DNA, 2252 bp, Homo sapiens
  ref <308>: DATABASE ACCESSION NUMBER: EMBL / AK022705
  ref <309>: DATABASE ENTRY DATE: 2002-08-06
agaggactatgaggcgggcgccaactgcttgggccgcagggcgggaggcagcgcgggagtggggcgttgaggggccggcctagcttggggctctggccttgcgtcttccgaccgaatcaccgctcctgagcccggtgcggggctgccgctatcgcctggccgtgggtgccggagcggccgggttgcgactcagcgttcttgggtgggcgcgggcggcgtctccgcggcgggcatcccccgaggccgccctcgggccatgatcgactccgtgaagctgcgccgcgacagcgcggcggacttcttctcccactacgagtacctgtgcgcgctgcagaactccgtgccgctgcccgccgtgcgcgcctgtctccgggagggcgtgctggatttcaacgccgaccgcctccgcggggtggactgggcgcctctgctgagcaccctcaagatcaataaagacctgcccttggtctccatcaagagcttcttccagccctggctgggggacacaggttctgacatgaataaattttgcagaagtcgtgttcctgcgataagatacaaagatgtgaccttccagttgtgtaaagctcttaaaggctgtttaagtatatcaagtgtgctaaagaacctggagctaaatggactaattctgagagagagggatttaactattctagcaaagggattgaataaatcggcttctttggtgcacctgtctcttgcaaattgtccaattggagatggaggtttagaaattatttgtcaaggtataaagagctctatcactcttaagacagtcaacttcacaggatgtaatctgacatggcagggagcagatcacatggccaagatcttaaagtatcagaccatgagaaggcatgaagaaacctgggctgagagtcttcgctataggagacctgatcttgactgtatggctggcttaagacgtatcacactgaatggctacacacttattggtgacctaggtgcatgtgcttttgcagactctctcagtgaggatttatggctgagagctcttgacctgcaacagtgcggcctcaccaatgaaggagcaaaggctttgctagaggcccttgaaaccaatacaactctggtcgttctggatataagaaaaaatccactcattgatcattctatgatgaaagcagttatcaaaaaagtcctccagaatggaaggagtgccaaatcagagtaccagtggataacttctccatcagtgaaggaaccatccaaaactgctaaacagaaaaggagaactataattctaggaagtggtcacaaaggaaaagctactattagaattggattggctacaaagaaacctgtaagtagtggcagaaaacactcccttggtaaagaatattatgcgcccgcgcctcttccacctggtgtgtctggtttcttgccgtggcgtactgcagaacgtgcaaaaagacacaggggtttcccattaatcaaaacacgtgatatatgtaatcagttgcagcaaccaggttttcctgtgactgtgacagtagagagtccttcatcctctgaagttgaagaggttgatgattcttcagagagtgttcatgaagtgcctgagagaactagtatagaacaagaagcattacaggaaaaactggaggagtgcctaaagcagttaaaggaagaaagagtgataaggcttaaggttgataaacgagtcagtgagctggaacatgaaaatgcccagttaagaaatataaatttctctttgtctgaagcccttcatgcacagtcattgacaaatatgatcctggatgatgaaggtgttttgggcagcattgagaattcttttcagaagtttcatgctttcttggatctccttaaagatgctgggcttgggcagcttgccacaatggctgggatagatcagtcagattttcaattactaggtcatccccagatgacttctactgttagtaatccacctaaagaagaaaagaaggcgcttgaagatgaaaaaccagaaccgaagcagaatgccctagggcaaatgcaaaatatccagtttcagaaaattacaggtgatgctagaattcctttgcctctcgactcctttcctgtcccagtttctactccagagggcttaggaacttccagcaacaacctaggagtcccagctactgagcagcggcaggagtcttttgaaggattcattgctagaatgtgttctccttcaccagatgcgacttctggaactggaagtc

SEQ ID NO: 14707 - protein, 665 aa, Homo sapiens
  ref <308>: DATABASE ACCESSION NUMBER: SWISS-Prot / BAB14190
  ref <309>: DATABASE ENTRY DATE: 2003-02-01
MIDSVKLRRDSAADFFSHYEYLCALQNSVPLPAVRACLREGVLDFNADRLRGVDWAPLLSTLKINKDLPLVSIKSFFQPWLGDTGSDMNKFCRSRVPAIRYKDVTFQLCKALKGCLSISSVLKNLELNGLILRERDLTILAKGLNKSASLVHLSLANCPIGDGGLEIICQGIKSSITLKTVNFTGCNLTWQGADHMAKILKYQTMRRHEETWAESLRYRRPDLDCMAGLRRITLNGYTLIGDLGACAFADSLSEDLWLRALDLQQCGLTNEGAKALLEALETNTTLVVLDIRKNPLIDHSMMKAVIKKVLQNGRSAKSEYQWITSPSVKEPSKTAKQKRRTIILGSGHKGKATIRIGLATKKPVSSGRKHSLGKEYYAPAPLPPGVSGFLPWRTAERAKRHRGFPLIKTRDICNQLQQPGFPVTVTVESPSSSEVEEVDDSSESVHEVPERTSIEQEALQEKLEECLKQLKEERVIRLKVDKRVSELEHENAQLRNINFSLSEALHAQSLTNMILDDEGVLGSIENSFQKFHAFLDLLKDAGLGQLATMAGIDQSDFQLLGHPQMTSTVSNPPKEEKKALEDEKPEPKQNALGQMQNIQFQKITGDARIPLPLDSFPVPVSTPEGLGTSSNNLGVPATEQRQESFEGFIARMCSPSPDATSGTGS

SEQ ID NO: 14708 - DNA, 1414 bp, Rattus norvegicus; identical to SEQ ID NO: 14251
  ref <308>: DATABASE ACCESSION NUMBER: EMBL / Y17295
  ref <309>: DATABASE ENTRY DATE: 1998-10-23

SEQ ID NO: 14709 - protein, 225 aa, Rattus norvegicus; identical to SEQ ID NO: 14252
  misc_feature (1)..(225): Xaa=Unknown amino acid

SEQ ID NO: 14710 - DNA, 1653 bp, Homo sapiens; identical to SEQ ID NO: 486
  ref <308>: DATABASE ACCESSION NUMBER: EMBL / D14662
  ref <309>: DATABASE ENTRY DATE: 2002-05-29

SEQ ID NO: 14711 - protein, 223 aa, Homo sapiens; identical to SEQ ID NO: 487
  ref <308>: DATABASE ACCESSION NUMBER: SWISS-Prot / P30041
  ref <309>: DATABASE ENTRY DATE: 2002-06-15

SEQ ID NO: 14712 - DNA, 1828 bp, Rattus norvegicus; identical to SEQ ID NO: 10469
  ref <308>: DATABASE ACCESSION NUMBER: Refseq / NM_017193
  ref <309>: DATABASE ENTRY DATE: 2002-11-05

SEQ ID NO: 14713 - protein, 425 aa, Rattus norvegicus; identical to SEQ ID NO: 10470
  ref <308>: DATABASE ACCESSION NUMBER: Refseq / NP_058889
  ref <309>: DATABASE ENTRY DATE: 2002-11-05

SEQ ID NO: 14714 - DNA, 2231 bp, Homo sapiens; identical to SEQ ID NO: 10471
  ref <308>: DATABASE ACCESSION NUMBER: Refseq / NM_016228
  ref <309>: DATABASE ENTRY DATE: 2002-05-16

SEQ ID NO: 14715 - protein, 425 aa, Homo sapiens; identical to SEQ ID NO: 10472
  ref <308>: DATABASE ACCESSION NUMBER: Refseq / NP_057312
  ref <309>: DATABASE ENTRY DATE: 2002-05-16
